United States Patent Application Publication US 2015/0337279 A1 - sequence listing, part 2

SEQ ID NO: 2860 - DNA, 2154 bp, Myceliophthora thermophilia
atgacggcgacggcagtgaagcgggcgtgcgacgcctgccaccgtcgcaaggtcaaatgcgacggaatcacgccctgtcgcaactgctcggcttcgcagctggcatgcacgtacaacgcggtcccgcaaaagaaaggtcccaagggctcccgagccaaggtcatcaacgaattgaaggagacgcaacggcagaccagtctttcggccaagttgcagggcggcatcaatggcggcgcgttgggggccggtctggctcccactcccaggcttctcaccaaggaaacgctcaaggcgtgcatcgacttctacttcgcccacatgcttccgacgatcccgatcctcgaccgccagcggctcgagcaagacgccatgtacatggaccaaaatctcgacgcgtactgcctcctgacgtcgctctgctccttcgtctgcctccaaccgggcatggtgatgcccggtgcgggagtgaacgacccctttggccaggactccatgttcggtgccaacgtcgtcaccagctcgctcttgatggaggagaccatccgcgttcgcaagggctacgactacgtggcatcgccgacggtcaacactctgtgcacgagcttcttcctctttgcggtacaccacggtctagagatgcatgataaggcatggttttacctgcgcgaggccaccaccttgacgcacatggccaggatgaacgaggagcaagcgtatatgcagtacgacagcaatgattctgtggacgcgtcacgccgcagacgcttgtactggcttctttttgtcaccgaacgggcctatgctttgcagcaccgtcgcccgctaacgctccaggccagcatcaatttaccacctccccaggagcaccctgctgacccttttacgcacaatggtaccacttcgctgcgattagtcagtctattccgtggctttgacgatgtcctcgcccctctctgggccaaatccaggggcgagtgttccgagtcctatctcaaggctctcgaaaagcagctgcaggatgttcttcccccatttcccaacgacacgcgggctcagcttgccgaaatgaccataaaccaacagtggctgaagcacaaggcttggagcttgagcgtggcgaacggcaacgggaacaacgccgagtcgtcgtacgttgatagcatccacgagctcctccccatggtctcgcacttccccggcaacctgggcttgcacggtctcagcctgtgtgagcatctcttcaacgtcacctgtgccatgaccgacttcctcagcatgctaccggcttctcggactcccttccgagccggcccccgggatcacctccgcaagatcttgaatatcgtaacggccatccggaacggcgaccaccgattcctcccgcttttgctgagcaccgttgcgtcgtatcttccgaaactcgccagccccatgcttcaggacgctccggagaacccgacagcttgcaacatggatcttctggacggcttcggaaacagtaccatctgcccgcccgtgtactcctctggtggtggtgactacgacaacaagttcaatgtttcgaggttcgatgagatgggctcggattccagtagtccaaatgggccttcgagcaacaacgacgtgaattcgccgtttgacagttcttcggccatcatgtctcctggcatggatatgccgcacggcctgcaaacggacttcacttccatgcccgaaatggtcatgagtcctctaagccatgccccaccgccttcatcgctcggcacgcccggaggaatgaatcagcaaccacagcacccgcaacacacgccgttgtcaccgtttccaaattcgaaccccaggatgcaggggttagatgccaataacatcaatccgccgcctaacataaacctgacaacatcccagatgcaccttaaccaagggcttgggaacggaatcaacaatggtctcggtcaaacagtcaacaacaataccctgatggccagagcgccaccgccacaacgagcgaacactttcggcatgaacctgccccacttgcgaacggtcggtgactttcaagcgctacagcgttccaattcggaagtgaactcgatgggccagctagggatgagcccgttagggccagaccttgacttcaacggtctttccaggtag

SEQ ID NO: 2861 - protein, 717 aa, Myceliophthora thermophilia
MTATAVKRACDACHRRKVKCDGITPCRNCSASQLACTYNAVPQKKGPKGSRAKVINELKETQRQTSLSAKLQGGINGGALGAGLAPTPRLLTKETLKACIDFYFAHMLPTIPILDRQRLEQDAMYMDQNLDAYCLLTSLCSFVCLQPGMVMPGAGVNDPFGQDSMFGANVVTSSLLMEETIRVRKGYDYVASPTVNTLCTSFFLFAVHHGLEMHDKAWFYLREATTLTHMARMNEEQAYMQYDSNDSVDASRRRRLYWLLFVTERAYALQHRRPLTLQASINLPPPQEHPADPFTHNGTTSLRLVSLFRGFDDVLAPLWAKSRGECSESYLKALEKQLQDVLPPFPNDTRAQLAEMTINQQWLKHKAWSLSVANGNGNNAESSYVDSIHELLPMVSHFPGNLGLHGLSLCEHLFNVTCAMTDFLSMLPASRTPFRAGPRDHLRKILNIVTAIRNGDHRFLPLLLSTVASYLPKLASPMLQDAPENPTACNMDLLDGFGNSTICPPVYSSGGGDYDNKFNVSRFDEMGSDSSSPNGPSSNNDVNSPFDSSSAIMSPGMDMPHGLQTDFTSMPEMVMSPLSHAPPPSSLGTPGGMNQQPQHPQHTPLSPFPNSNPRMQGLDANNINPPPNINLTTSQMHLNQGLGNGINNGLGQTVNNNTLMARAPPPQRANTFGMNLPHLRTVGDFQALQRSNSEVNSMGQLGMSPLGPDLDFNGLSR

SEQ ID NO: 2862 - DNA, 264 bp, Myceliophthora thermophilia
atgaccgaccgcggtacggattactcagtgggccaagagaaccactactccgtacggagtagtaaggtaccaatatcctgcgaggagcaccttacatacagtgcaacgtcgttgtattccgcccatcaggtacggagggatccgtggcagtttgcgcacggtccatcttccggaagaggaaccgagtccctcttctgccccagcggtttcctccttgttcaagtagttacagatcaatctggcaaccaacttccgacggagtaa

SEQ ID NO: 2863 - protein, 87 aa, Myceliophthora thermophilia
MTDRGTDYSVGQENHYSVRSSKVPISCEEHLTYSATSLYSAHQVRRDPWQFAHGPSSGRGTESLFCPSGFLLVQVVTDQSGNQLPTE

SEQ ID NO: 2864 - DNA, 1578 bp, Myceliophthora thermophilia
atgattcctcggcgctacacttgcacgacaccccgaaccgccgttatcgattcctcatacgcgcccgacgcgaccgagactgcccctggggccaagcgcaaacccggcgtacgcggccatctggttgctcagcttcgcaacaagaccatcaaccacgccggcagcgagggcacacctcccgccggcacaaccacaagcaccgcgcccgccgtaacctccatcgccggcattctcgactggggccatgccgccacgccatctccgcctcgctgcttcgagccggtcccactggccgccggcttctcgcaggagttcttcctgaggctgttgcccgagtacgagcagctcgtctaccctgtcaaccccgtgctgactcccgacgagatgcgctctgccatcgggaacatgcacgtgagctatgaggacgccgccctcgtccacgcctttggcgccatcaccctcaacctaacgcagccatcctggaaccttcacggcaacgtcgcgtcgcagatgacgttgctccttcagcacagcctgtgggcctaccgcaaggccgacatggggagggacacgtcggcggactacctcctaaacgagatgcctctgacggtgaagcgagccatggtcgggatatggaacgaatgttcgctcatggccttcaggcgcttcgaccgtagcttcgcaagcctccgcgaggccatcaccatgattcagatgctaaacatacaccgatactccgaggacaacctctgtgggttgacacgccgcgaagtctcgcgccagcagcgcatgtactgggaagcctatatacatgagcgattcctatgtgtcatgtcgggctatccttgcaccatgattccgctgcggacgggcctgcccatcaccgacccggacgtaccgccccacgtcacggtaggcttcaaccgcctgatccggctgttccagattatggatgcgccgttgctcgcacactgggccgcccaggacataccggacgcacctactatcacggccgagtggatcgagcacaagcaggcacaactcgatgccgacgaggccgagacggcggaagcggcccgcgaccttgccgccagcggcgccgggaccctgagcgaggagcagcacgtcgacctctttgtcacgcgcctctggctgcgcaccctggtttggcagctcgccctctcgcacggccttctccggtcggcacccccgcgcgacgcccacgagggtttctcgctgcacttccccgcgcagcgcctctcggcacagctgcgcgggctcgtcagccgtctacgccacacgtcgagcatcattactcacggcagcggcatcctgcagaaactgttcgagatcaccagcaccgtggccgatgtgctcgccctaccgcgcgggccaggccagactcaggaagaggcccgggcccgcgtggaggattttctgttcctggtccgcttcatattcagctttgagcgcacccagaaacatcatcgcgagtacctcctagacaagttgactaccttgcgggaaatgtacacggtagtggattttggaacattgggaaggaccccggaaggataa

SEQ ID NO: 2865 - protein, 525 aa, Myceliophthora thermophilia
MIPRRYTCTTPRTAVIDSSYAPDATETAPGAKRKPGVRGHLVAQLRNKTINHAGSEGTPPAGTTTSTAPAVTSIAGILDWGHAATPSPPRCFEPVPLAAGFSQEFFLRLLPEYEQLVYPVNPVLTPDEMRSAIGNMHVSYEDAALVHAFGAITLNLTQPSWNLHGNVASQMTLLLQHSLWAYRKADMGRDTSADYLLNEMPLTVKRAMVGIWNECSLMAFRRFDRSFASLREAITMIQMLNIHRYSEDNLCGLTRREVSRQQRMYWEAYIHERFLCVMSGYPCTMIPLRTGLPITDPDVPPHVTVGFNRLIRLFQIMDAPLLAHWAAQDIPDAPTITAEWIEHKQAQLDADEAETAEAARDLAASGAGTLSEEQHVDLFVTRLWLRTLVWQLALSHGLLRSAPPRDAHEGFSLHFPAQRLSAQLRGLVSRLRHTSSIITHGSGILQKLFEITSTVADVLALPRGPGQTQEEARARVEDFLFLVRFIFSFERTQKHHREYLLDKLTTLREMYTVVDFGTLGRTPEG

SEQ ID NO: 2866 - DNA, 309 bp, Myceliophthora thermophilia
atgtggctccctactactacttacaaaccgcccaaggacagaacagacgacgcaattgcctgtcttgagtgggtgaaaggatctctcgcccaggtggacaacccgcataatggaggcgccgtggtggattttgccatgcaggagccaaccgccagcggccatgaacccgcccagcacgatcactctaccaattcaaccagcccggtgatcagcagctcgagggcttgcactggccatccgccgggcgcttggctgagcgagcatccgcgggtcagccacagccgccggtctgatgtggccgtggcatga

SEQ ID NO: 2867 - protein, 102 aa, Myceliophthora thermophilia
MWLPTTTYKPPKDRTDDAIACLEWVKGSLAQVDNPHNGGAVVDFAMQEPTASGHEPAQHDHSTNSTSPVISSSRACTGHPPGAWLSEHPRVSHSRRSDVAVA

SEQ ID NO: 2868 - DNA, 2070 bp, Myceliophthora thermophilia
atggatcccatcgctgttaactcgtccaacaccttggcggacagcggcaagttggccgaggatgacatcccccgggacggcactggagttttgaagctcgacccttggctgtcgcctttccaggactcgctcaagagacgctacgccaaggcccaggaatggatcaagcggatcgacgagacagagggcggattggacaagtttagcaaggggacggatctctttggactgcgggtgaaggaggacggcagcattgtttacagggagtgggctccgaacgccgtgcgggcgtcccttattggcgacttcaacaaatgggacaacaaggcccatccgatgaagaagaacgagttcggcgtctttgaaatcaccatccccccaacagccgatggcaagcctgccatcccccacaaatccaaggtcaagatcactctcgagctgcccaccgcagaatgggtcgacaggctaccggcctggatcaagtacgtcacgcaggacctgtccgtctccccggcctacgatgcccgcttctggaacccgccgccggaggagcggtacgtgttcaagcacgcccggcccaagaagccggccagcctgcgcatctacgaggcccacgtgggcatctcgtcgcccgagctgcgcgtcaccacctacaaggagttcaccaagaacatgctgcagcgcatcaagggcctgggctacaacgccatccagctcatggccatcatggagcacgcctactacgccagcttcggctatcaggtcaacaacttcttcgccgccagcagccgctacggcgagcccgaggacctgaaggagctggtcgacgtggcccatagcctgggactcgtcgtcctgctggacgtggtccacagccacgcgtccaagaacgtgctcgatggactgaaccactttgacggcaccgaccatcagtacttccacgagggcggcaggggaaggcatgagctctgggacagcaggctgttcaactatggccatcacgaggtcatgcgcttcttgctgagcaacctgcgcttctggatggacgagtatcagtttgacgggttccggttcgatggcgtcacgagcatgctctatctgcatcacggcattggaaccagtggcttttccggcggttaccacgagtattttggtgccgctgttgacgaggaggccgttgcgtaccttatggtcgccaacgagatgcttcaccagctgtatccggaggtcatcaccgtggccgaggacgtctcgggcatgccggcgctctgcctgccgctctcgctcggcggcatttggatcctgaaggagttgaaggacgaggattggaatatcggcaacatctgctggacgctcactaaccgccgccacggagagaagacgatcgcatatgccgagagccacgatcaggctctggtcggcgacaagacccttatgatgcacctctgcgacgccgaactctacaccaacatgtctgtgctgacgcccctgacccccgtcatcgaccgcggcatggccctgcacaagatgatccgcctcttaacgcacggcctgggcggcgagggctggctcaactttgagggcaacgagttcggccacccggagtggctcgacttcccgcgagagggcaaccaaaactcgttctggtatgcccggcgccagctgaacctcaccgaagatcacctgctgcgataccagttcctcaacaactttgaccgctccatgaacctctgcgaggccaagtacggctggctgcactcgccgcaggcctacatctcgctcaagcacgagggcgacaaagtcattgtctttgagcgggccggcctggtctttgtcttcaacttccacccgacccggagctataccgactaccggatcggcatcgaggtccccggcacctaccgcatcgttctcgattccgacaccaaggagcacggcggcttctgccgcctcgatccggacacccgcttcttcacggaaccgctcgagtggaacgggaggaaaaactgcactcatgtttacattccgtgcagaaccgcttttattctggcgctcgagtcaactctctag

SEQ ID NO: 2869 - protein, 689 aa, Myceliophthora thermophilia
MDPIAVNSSNTLADSGKLAEDDIPRDGTGVLKLDPWLSPFQDSLKRRYAKAQEWIKRIDETEGGLDKFSKGTDLFGLRVKEDGSIVYREWAPNAVRASLIGDFNKWDNKAHPMKKNEFGVFEITIPPTADGKPAIPHKSKVKITLELPTAEWVDRLPAWIKYVTQDLSVSPAYDARFWNPPPEERYVFKHARPKKPASLRIYEAHVGISSPELRVTTYKEFTKNMLQRIKGLGYNAIQLMAIMEHAYYASFGYQVNNFFAASSRYGEPEDLKELVDVAHSLGLVVLLDVVHSHASKNVLDGLNHFDGTDHQYFHEGGRGRHELWDSRLFNYGHHEVMRFLLSNLRFWMDEYQFDGFRFDGVTSMLYLHHGIGTSGFSGGYHEYFGAAVDEEAVAYLMVANEMLHQLYPEVITVAEDVSGMPALCLPLSLGGIWILKELKDEDWNIGNICWTLTNRRHGEKTIAYAESHDQALVGDKTLMMHLCDAELYTNMSVLTPLTPVIDRGMALHKMIRLLTHGLGGEGWLNFEGNEFGHPEWLDFPREGNQNSFWYARRQLNLTEDHLLRYQFLNNFDRSMNLCEAKYGWLHSPQAYISLKHEGDKVIVFERAGLVFVFNFHPTRSYTDYRIGIEVPGTYRIVLDSDTKEHGGFCRLDPDTRFFTEPLEWNGRKNCTHVYIPCRTAFILALESTL

SEQ ID NO: 2870 - DNA, 228 bp, Myceliophthora thermophilia
atgatcgacaacctccctgatgactccctacaacccgcctgcctccgcccgggccactacctcgtccgccacgagatcatcgcgctgcactcggcctgggccgagggcgaggcccagttctaccccttccccctttttcctttttttccctcccttcttttgtccggtaactacacgattcccggtcccgcgatctggaagtgcccagaggcacagcagaacgagtga

SEQ ID NO: 2871 - protein, 75 aa, Myceliophthora thermophilia
MIDNLPDDSLQPACLRPGHYLVRHEIIALHSAWAEGEAQFYPFPLFPFFPSLLLSGNYTIPGPAIWKCPEAQQNE

SEQ ID NO: 2872 - DNA, 258 bp, Myceliophthora thermophilia
atggctatcattcgccgacgaagggcgcgtcacaaggcgatattaggatcacactatgtggtggactgggcctaccagggctccagccctaccgaggttacagccacccacatcttcctgcaggctggctctggacgcctccgtccttcttcctccagaaccatcgccaaccatcagagtagcagagatacgaagatcgtcagttctatccgcgcatccactgcaagacactatgatatagataggaaacagagttag

SEQ ID NO: 2873 - protein, 85 aa, Myceliophthora thermophilia
MAIIRRRRARHKAILGSHYVVDWAYQGSSPTEVTATHIFLQAGSGRLRPSSSRTIANHQSSRDTKIVSSIRASTARHYDIDRKQS

SEQ ID NO: 2874 - DNA, 420 bp, Myceliophthora thermophilia
atgtctgccgcctcctatatagtaactaagttacgcctagtcaccgccccttatacccccacctactatattaacactaatactacccttgtcgcctacgtcttaggcatgctatcacctacctcctacgcctactcgtacgcctccgcgcgccctatacctatgccaattgacttcggccgctctcgtacctaccgctcttcttcgcctaccgaccgtacagcacgcccgatccataaccgcaaggagcctgctaacgtcttagaggaggaagaagaaaaggaggagtttaaggaggagcttgtagagtttgcctatatatacgaaaatttaaatcgtttgcttttatacctttccttatctcccatttattttctaatagctcctaagttagggtattatatctcctctattttataa

SEQ ID NO: 2875 - protein, 139 aa, Myceliophthora thermophilia
MSAASYIVTKLRLVTAPYTPTYYINTNTTLVAYVLGMLSPTSYAYSYASARPIPMPIDFGRSRTYRSSSPTDRTARPIHNRKEPANVLEEEEEKEEFKEELVEFAYIYENLNRLLLYLSLSPIYFLIAPKLGYYISSIL

SEQ ID NO: 2876 - DNA, 2052 bp, Myceliophthora thermophilia
atggggcgcccccctgcgtacctgttcgttgtaaggcatggttaccggctcgacgctgccgacaagcaatggcatctcacctccccgaccccatacgatcccccccttacatacagcggctggcagcaggcgaagagcttgggtgcccgaatagcttccatcatacgggaaaggatccaggaagaagagcatagcgcgagccaaagcacagatgcatctgatcagactgggaggcggaaacggaaaagatacgaagtcgtcctgcacagctcgccgttcctccggtgcatccagacctcaattgccatcagcgccggcctcgcccaggactcgagccccttcgagacccggaaagcccacgctgcgtcctccgatcctgccccctcggcggcaagcgagtccaggccaaccgttacgacggatttccgagatacgaatgcgcccggtcccgctgctgccactaacaagatccgcaagtccgttctccggttggatgccttcctcggggaatggctctcgccaagctacttcgagtttatcaccccgccgcccgagtcggtcatgatgttggccagcgccaaggccgacctccttcgccgcgaagactacacccaccgcctcacacactcacactctgtatcgcacacccactccggctcccagggccagctctggagcccggcatctagggaccgtttcggctcttcgaccaacggggaccagtccaatggctccggctccggcacaggcacagacctggcatcccccctttcacccggcgggaataccaacggtcggagcaatgaacacgcgcaacaaggaaggggtggttacgtgtcccccgtcccccattacgcgatcagcaacaaccacacgatccccatgggctacgtctcccatgctcgggacgcttgtgccatcgttgactatcagtggcactccacacgaggcgccctggattggggagacggcgggaccttccccgaggagtgggccgccatgcacaagcgattccgcgctggtctgcagagcctggtcgactggtactcgacaacggagaagcccacccggccggtcacccggagtgcaatgtccgcgcacgccgacgacaactcgccagagagcgaagaggacgtcgaaacggaagctatagtcatcctcgtctcccacggggctgggtgcaacgccctgattggagccatcacccatcagcccgtcctgatggacgtcggcatggcgtcccttacgatggccgtgcgtaaacccgacgcggagacgacaagcttctcgggggagaccaaaaacacgccgcccgtccaccagctttatgacctccagctgttcgcgaataccgaccatctgcgatcacccgccggaaccccgacgagcgtgcggtctcctgcaatggcgggcgcgacgaacggcatccggggacgccattcgtcattttccacctcggtcaacgggttttcgtggaatgacggcggcggcggtggcagcagcagcagcagcaacagcagcagcagccggagcccctccaccaacaactcctggaacggatttcgcaagagctccccgaacgactcgagcgtcccgcggctcaactttgccgtcagcaccggcggtatcacggtcggcagcggcgtgacgtcctttgcgccgacgcggacgtcgaccttggggcgcacgggcagtggtagtcgcagcggcctctggtcgcccatggcggacgacgaggaagacgacgacatcccggtcctgaactttggcacctacgggaagacggcagccgactccaccgcttcggcatcacccgcccctgcgcccgagctgagctccgtgaaaacaagcaacggacgggcggatcccggaccgtcaacggacggaaaacctggcgggcctggcgcgggtggctcaccgaagccggcacccgagcagttcagcagtgggacgagcgggctctggggctcaccccagccgcccgacgatgcggaccgcttccgtgacctcagcggcctcaaacggcggtggacggttactgagcggagttaa

SEQ ID NO: 2877 - protein, 683 aa, Myceliophthora thermophilia
MGRPPAYLFVVRHGYRLDAADKQWHLTSPTPYDPPLTYSGWQQAKSLGARIASIIRERIQEEEHSASQSTDASDQTGRRKRKRYEVVLHSSPFLRCIQTSIAISAGLAQDSSPFETRKAHAASSDPAPSAASESRPTVTTDFRDTNAPGPAAATNKIRKSVLRLDAFLGEWLSPSYFEFITPPPESVMMLASAKADLLRREDYTHRLTHSHSVSHTHSGSQGQLWSPASRDRFGSSTNGDQSNGSGSGTGTDLASPLSPGGNTNGRSNEHAQQGRGGYVSPVPHYAISNNHTIPMGYVSHARDACAIVDYQWHSTRGALDWGDGGTFPEEWAAMHKRFRAGLQSLVDWYSTTEKPTRPVTRSAMSAHADDNSPESEEDVETEAIVILVSHGAGCNALIGAITHQPVLMDVGMASLTMAVRKPDAETTSFSGETKNTPPVHQLYDLQLFANTDHLRSPAGTPTSVRSPAMAGATNGIRGRHSSFSTSVNGFSWNDGGGGGSSSSSNSSSSRSPSTNNSWNGFRKSSPNDSSVPRLNFAVSTGGITVGSGVTSFAPTRTSTLGRTGSGSRSGLWSPMADDEEDDDIPVLNFGTYGKTAADSTASASPAPAPELSSVKTSNGRADPGPSTDGKPGGPGAGGSPKPAPEQFSSGTSGLWGSPQPPDDADRFRDLSGLKRRWTVTERS

SEQ ID NO: 2878 - DNA, 309 bp, Myceliophthora thermophilia
atgggacctgaaaagggctgtctgtgttctcaagttccatcttggagtcttgtggccctgcgcgacgtgaccaagttcgaggcgaccttcctgttcgcgccatgccatgtgccattaccacaggcccatgcattcttcccaatatcagggctaacgcgatccatggctgtctccgagacatcgcggccatccggccatctcggacttattgtgtacggagtacggattgctgtacgtccaggtgcatcactccccaaggcaggtcctattggctccttactgcgtaaactcgcatcctgcgcaacataa

SEQ ID NO: 2879 - protein, 102 aa, Myceliophthora thermophilia
MGPEKGCLCSQVPSWSLVALRDVTKFEATFLFAPCHVPLPQAHAFFPISGLTRSMAVSETSRPSGHLGLIVYGVRIAVRPGASLPKAGPIGSLLRKLASCAT

SEQ ID NO: 2880 - DNA, 924 bp, Myceliophthora thermophilia
atgggaacggtaggcaacaatgggaggaataagctcgaagggagggccggtgccgaggagggccaacatcttcaccaggaacaaaaacgttccaaacagcgacaatctgcccctattgcccagcgatgtcagaagaagaaaaagcagccggcgcactcgggcctggaggaccacaaccagcacgtcgcggacccgctcgcgcacttcctcgccatcccctgggcggccaggctgctcacgggcccggcgaccttcggcatcgtggtaccggaccggcgcccgctggcctcgggcgacaagcggctcgtgaggagcgtcctgaacggcgcgggcacggtgcgggcctgcgtgacgttctttatgaagctgccggcgcacggagaagaaaagggaaacgacgagtataaggacaaggacaaggacagggaggaggaggaggaggaggaagagtggtggtgtgcgggatccgagccgcgccgtggtggccatgacgacaacggcggcggcactagatcgttgctaccattgtccaggagcactgcgctcctgcggagcgggggcccccgggacggcgaggaccccgagagaccgttcctgctattcaatgcgctcctggatctgggcgaggacctgtgcgggtacaagggcatgatgcatggcggtgcgctggcggtaattctggacgagacaatgtgcgccgcggcggataatcagagtcgttgtgcattcacggcgacgatgtcaatcagcttcctgaggcctgtcaagctgccaggccctgtgatcgtcagatcgagggtcgtcaagaagcaggggcgcaagatccatgtgaggggggcgattgaagacggtgaaggtaacgttctggcggagagtgaggcagtgctggtagacaagacaccgtcgatggcgggcaaactgtga

SEQ ID NO: 2881 - protein, 307 aa, Myceliophthora thermophilia
MGTVGNNGRNKLEGRAGAEEGQHLHQEQKRSKQRQSAPIAQRCQKKKKQPAHSGLEDHNQHVADPLAHFLAIPWAARLLTGPATFGIVVPDRRPLASGDKRLVRSVLNGAGTVRACVTFFMKLPAHGEEKGNDEYKDKDKDREEEEEEEEWWCAGSEPRRGGHDDNGGGTRSLLPLSRSTALLRSGGPRDGEDPERPFLLFNALLDLGEDLCGYKGMMHGGALAVILDETMCAAADNQSRCAFTATMSISFLRPVKLPGPVIVRSRVVKKQGRKIHVRGAIEDGEGNVLAESEAVLVDKTPSMAGKL

SEQ ID NO: 2882 - DNA, 483 bp, Myceliophthora thermophilia
atgtcggaaccgcagcccggcaaaccgcagaaacatgcccagacttatctcagtctccccggcgaggaacgggaatggacaaaacctctcttcccctatctcgtccttcaatccgtgaagcctgacgggccccatccctcagtgacgttcaagttcaccgtccagccgcagcactgcaaccgtctcaataatctacacggcggctgcaccgcaagcctcttcgacttttgcacctcgaccgtcctggccgccgttgcccgcccaggctactggtcctacctgggcgtgagccggtccctgaacaccacctacctccgcccggccccggtcggcagcgaggtgctgatcgagtgcgagatcgtccagatcggccagcgcctgtgcagcctgcgcgggaccatgcggcgcgccgacgacggcgccctggtggcgacctgcgagcacggcaaggtcaacaccgatcccgaggtgcccaaggtctga

SEQ ID NO: 2883 - protein, 160 aa, Myceliophthora thermophilia
MSEPQPGKPQKHAQTYLSLPGEEREWTKPLFPYLVLQSVKPDGPHPSVTFKFTVQPQHCNRLNNLHGGCTASLFDFCTSTVLAAVARPGYWSYLGVSRSLNTTYLRPAPVGSEVLIECEIVQIGQRLCSLRGTMRRADDGALVATCEHGKVNTDPEVPKV

SEQ ID NO: 2884 - DNA, 1254 bp, Myceliophthora thermophilia
atgatcgtcccggaaccagccacatccaaccgccgtgcagaagaccctctgactcaacccgaccaagcttcatcatcagccccagtcatacccgacacctcgagcctgagcatctccctccgcctgtctgacaccactgctgcctccgttgttgcctcccctgctgctgctgctgctgctgctgctactgctatcaccaccaccaccactactatgggctccaagttctggccgaagcgggggtcgccgggcatcctgcatcattttaccgagactctggtcgccttcgagttcaccaaggggtcccggccaaaaccacacagcatcctcttcctcggggggctcggcgacgggctggccacgacgtcgtacgtggcggacgtggtggccgggctggagccgaccccgtggtccctcttctccctcaacctgacctcgtcctaccaggcctggggcttcggccacctcgaccgggacacggacgagatcgcccagtgcatccgccacatccgggactacaagacggccgagtacgctaccccaacaagtagtcctacatggccactcgaccgacatgagccgccgttcgaccgaggcctggagcacgtcgtgcgccccgccgtcgacggcgccatcatgcaggcccccgtctccaaccgcgaggccctccagctcatcatgcgagacggcttcctcggccgcaccccggccgagctgcgcgacaccttcgaccgcctcgtcgccaccgcccgcgaagccgtcgcccgcgaccccggctgcgactcgatgctgcccatctccctgaccgcccagttcggctacccgcgcaacacccccgtcagctgccgccgcttcctcagcctcgccagcccggacagcccggagtccccgtccgaggacgacaccttcagctccgacctgcccgaccgccacctcgcccgcaccttcggcatgatccggtcccgcggcctgctccgccacaccctcatggtcctcatgtcgggcgccgaccaggccgtcccggactgggtcgacaaggaggccctgctggaacgctggcgccgcgccaccgacgccgacgccgacgccgacgccgacgccgacggtgcgccgcccccgatctgggaccgccaacgcagcggcctcatcccgggcgcctcccacgccctcagcaacgacgaccaggccgagccgcgtgccttcctcgtccgccgcgtgctcgactacctcggcgagctcgagcagaaaccctaa

SEQ ID NO: 2885 - protein, 417 aa, Myceliophthora thermophilia
MIVPEPATSNRRAEDPLTQPDQASSSAPVIPDTSSLSISLRLSDTTAASVVASPAAAAAAAATAITTTTTTMGSKFWPKRGSPGILHHFTETLVAFEFTKGSRPKPHSILFLGGLGDGLATTSYVADVVAGLEPTPWSLFSLNLTSSYQAWGFGHLDRDTDEIAQCIRHIRDYKTAEYATPTSSPTWPLDRHEPPFDRGLEHVVRPAVDGAIMQAPVSNREALQLIMRDGFLGRTPAELRDTFDRLVATAREAVARDPGCDSMLPISLTAQFGYPRNTPVSCRRFLSLASPDSPESPSEDDTFSSDLPDRHLARTFGMIRSRGLLRHTLMVLMSGADQAVPDWVDKEALLERWRRATDADADADADADGAPPPIWDRQRSGLIPGASHALSNDDQAEPRAFLVRRVLDYLGELEQKP

SEQ ID NO: 2886 - DNA, 1659 bp, Myceliophthora thermophilia
atgggaccgtttggcaaccttggggagagcctccggtctttcaccccacaggagcgccgcaacattgccctgtacatcgcggggattatggtgtacaagttcggtcttgaagcgttcaacggctcggtcatagcacttgccaccaacagatacgatcacgaagcagccatcaacggaacgcctagccgaacttttgagcgagtcggtctgctcactgggctaaatcaggcctgtcaatgtatcggttccattctaattggacccttggtgaaaagatatcctactaagaatgtgctcgcctgtgccatcgttatctttggagcctgctcggctctcttactcattatcgacgcggcgaccggaggtaccttcatgcctgcagcttctcgcaccaaccaccgcgaccatggccactacggaaagtacaacacagacatcatgataccggtgtactgcgcgtgcggcatagtgtacggcatggtggagctcatccgccgggtcatcccgcgcgatattgttgggggacacatccagaagctgaagaggctggattccatggttcatatattctacgaggtatccggcacggccggggcattcacgacagggctggtcatcatcccccagctcggcaacaacatggcctttatcgtcacgcctgcctgcttcctcatcagcgccgttgcctgggttttcatcagcgatctgggcttccgccgccggaccgcacacctgcaagcaatcgaaaggccgtcctacttcaaggccgctctcagcggcctctacctctttgtcgagtcgatctgggtcggcgccaggatcctcttcacctcgcgcaagttcatctggctcgtgccgggctactcggtcgcgctctacgcccaccggttcctggaaaacaacgtggccccgcagatagcccagcgatacatgggcaactcggcctgggcgcagatcatcgtcggcggctccaacctgggcgagctgatcggcgcgttctcggtcttcctcttcaccaacgccgtgcaaacgcccatgccctggctgcgcctggacgcgctgatgctgctgatcgtctggtacataccgttctggcggcccccgccgggccgcgtcggccaggcgtggatcgccgccgccacgttcgcgcccatctcgtacggctgggcctcgggcgacgtgtcgctcgccgcctacatccaggcgtccctggcccgcatcgagtcgcagaacaagaacgtgtcggccctcggcgccgtcatggcgttcctctactccttctacatcaccacctacgccgtcgcgggaaccctcctggggagatacctcgacggcgtgtacaacagaacgggcggcaccgacgggggcggcgaggtccgcaccggcctgctcttcactgcgggcgtgcagatgacggtcatctcggcactcgtgttggcgtccacgtttgtgcccaagggctcgttcgcgttcaaccccaagatgatctcggacgagacgctcgaagacgagcacatcgaggtcgaggagcagcggccgggcccgggcccggccgaggagtacaatctaaaagacggattcaagaatgcggggagttattgcagtagcgaggatggatccgagtcgagggtggtcaagaagatcagcgagatattgtag

SEQ ID NO: 2887 - protein, 552 aa, Myceliophthora thermophilia
MGPFGNLGESLRSFTPQERRNIALYIAGIMVYKFGLEAFNGSVIALATNRYDHEAAINGTPSRTFERVGLLTGLNQACQCIGSILIGPLVKRYPTKNVLACAIVIFGACSALLLIIDAATGGTFMPAASRTNHRDHGHYGKYNTDIMIPVYCACGIVYGMVELIRRVIPRDIVGGHIQKLKRLDSMVHIFYEVSGTAGAFTTGLVIIPQLGNNMAFIVTPACFLISAVAWVFISDLGFRRRTAHLQAIERPSYFKAALSGLYLFVESIWVGARILFTSRKFIWLVPGYSVALYAHRFLENNVAPQIAQRYMGNSAWAQIIVGGSNLGELIGAFSVFLFTNAVQTPMPWLRLDALMLLIVWYIPFWRPPPGRVGQAWIAAATFAPISYGWASGDVSLAAYIQASLARIESQNKNVSALGAVMAFLYSFYITTYAVAGTLLGRYLDGVYNRTGGTDGGGEVRTGLLFTAGVQMTVISALVLASTFVPKGSFAFNPKMISDETLEDEHIEVEEQRPGPGPAEEYNLKDGFKNAGSYCSSEDGSESRVVKKISEIL

SEQ ID NO: 2888 - DNA, 1269 bp, Myceliophthora thermophilia
atggagaacctacaggcaacgttcggagtagaggcagccgacaaaatccttgctgctgccgtggcctatcccgacgacatgctacgtttcatagaagacattcctcctccatccgagccagtcgaagattatatcacagagatggacaggcggcgcgacctctttaacgagttacaagttatgtgccggcctcataagacgcaaccaaacgcgacttttctcgcccttttcatggtcgcgcctatatcggggatttccaatttcctagagaggattcgcggacagctaattgacgaccaattctattacgtgcttggcgctcgcgctcaaatgcagactggaatcagagcctatcttgccaaaggtggttctcctgagtcgttgaactctccgtttctagcgatagacatcgcagatcctagcgaactagacatgcctagcccttctaacatcgtgacgagaaagcacgaattctctgatcaagtaaaaaatcgagatgggcatgcttgtgtattctccggaacgtccgatcccgaggcagcgtatattttccctttcgcaacaagcaagaaccaaaatttcctctaccttacacgaatgctcaatatcttctggggccccgagaagacccaggcatggcgtcagatgttcgaagacgccaatatcacccaatcagctaaaaacggcatttcgatgaaccaccaaatccacttctggtttgataacgcgaggttcgcccttaagcctcttcgagaaacgcccgagggagtcgttgtccagtggcactggctaaagagaagtgttctgaagccacttgtcgatattcgcccagatcaagatacccttctccaggctggaatcacggaccagaactggggtgacaacttggcacaccggaagagtggggtgagaatccgaactggccagacatttctcatccgagcaaacaagcccgaggacagggtcagctgggatctcctggaaatgcaatggaatcttttacgtgtcgcagccatctctggagcggccgatgttacggacgattattacgattacgatgaaccggatgagcgtgcctacgatgcagaagtagctgctaaacaacgtgtcatcctagccgagcatgggacagccgcccgggataagagcgagtactatgggggtgaacaaagcaaggccaagcaggccagaacgcctggtgactcggatagtgagagaagcaataacgatggtgggcctggggatagcagcggcggtggcgctgcctag

SEQ ID NO: 2889 - protein, 422 aa, Myceliophthora thermophilia
MENLQATFGVEAADKILAAAVAYPDDMLRFIEDIPPPSEPVEDYITEMDRRRDLFNELQVMCRPHKTQPNATFLALFMVAPISGISNFLERIRGQLIDDQFYYVLGARAQMQTGIRAYLAKGGSPESLNSPFLAIDIADPSELDMPSPSNIVTRKHEFSDQVKNRDGHACVFSGTSDPEAAYIFPFATSKNQNFLYLTRMLNIFWGPEKTQAWRQMFEDANITQSAKNGISMNHQIHFWFDNARFALKPLRETPEGVVVQWHWLKRSVLKPLVDIRPDQDTLLQAGITDQNWGDNLAHRKSGVRIRTGQTFLIRANKPEDRVSWDLLEMQWNLLRVAAISGAADVTDDYYDYDEPDERAYDAEVAAKQRVILAEHGTAARDKSEYYGGEQSKAKQARTPGDSDSERSNNDGGPGDSSGGGAA

SEQ ID NO: 2890 - DNA, 1896 bp, Myceliophthora thermophilia
atgacctcaaactgctctggcagctggcaattagtgtcaagcgccgacaacctgctggtactccatcctccgctcattgacttgccaataacggaaaacgattcgattcttagagaacccgacactcagtcttccttaccttgcggaacctgggaagatatgagccggccgtacaagcgtccggctcttgcagatggagatggcgatggcgatggcgatggcgatggcgatggcgaaccaagtaggaagtacacgccggtttcgctcacacaccccgtcagtcctccgctgaagaagcggcgacgtgcacaatcgttggaggagactgagccagcccggtcgccctcagcatcccgtagggtatttgactctcccttccgcctgacaaaaattcgagacttgccccgggagatgaataaggatacaatcacactcaaggatatactgggcgacccgcttatcgcggagtgctgggagtttaactatcttcatgacatcgactttctcatggcggccttcgatccagatgtccggcatctggtaaaagttcacgtggttcacgggttctggaagagggaagacccaaacgggctggagcttcagcctaatgtttaccaggaagcggcatcccgcttccaaaatgtcacccttcacagcgcgttcatgccggagatgtacggcactcatcattccaagatgatgattctcctacggcgggacgacacggcccagatcgtcattcacacggccaacatgatcatccgggattggaccaacatgacccaggctgtctggctctcgccgaggctcccgctcatggaaccatcgcggtgcgacgccaggccggaggaagtcgcggcgggcagcggagccaagttcaagatcgacttcctcaactacctccgtgcctacgacacccgcaggaccacctgcagacccattattgaccagctatccaaatacgacttctccgcgatccgggggtcgctcatagctagcgtgccaggcaggcacaaactcgacgatacttcgcctaccaggtggggatgggcggcaatggagcaggccctcaaatctgtccccgtctcatccaggagatccgacattgccattcagatctcctccatagcaaccctggggccaaccgacacctggctcaagagtactttcttccgctccctcagcggcgggcgacctggcggcaccctccaacaaccacctaacttccaagtgatcttccccacacccgacgagatccgtaaatccctagatggatacagctctggggcctctatccacacaaaagtccaatcgccgcagcaggtgaagcagctagcctacctccggccaatgctttaccactgggccaacgattcggccaacggcgcggaccctcaagaaggaggaggaggaggagaaagaagaagagaagactacgagaacgacggcggtgacgatgagggagactccgccgtggtcgtcaaggaggccggccggaaacgcgcggcgccccacatcaagacgtacatccggtacggcgacaagtcgggcccctcgatcgactgggcgctggtcacgtcggccaacctgtccaagcaggcgtggggcgaggcggcggtccgcggcgccgacgggggcgcgacgatgcgcatcgcctcgtacgagatcggggtgctggtctggccggggctgtacggcgagggcgcgatcatgaggggcacgttcctgacggattcgttggggacagaggaggtgaaagagggcacgacggcggtggcgctgaggatgccgtataacctgccgctgcaaccgtatggcaagggagaggtgccgtgggtcgcgacggcgaattactcggagccggactggaaagggcaaatatggaggcacggttga

SEQ ID NO: 2891 - protein, 631 aa, Myceliophthora thermophilia
MTSNCSGSWQLVSSADNLLVLHPPLIDLPITENDSILREPDTQSSLPCGTWEDMSRPYKRPALADGDGDGDGDGDGDGEPSRKYTPVSLTHPVSPPLKKRRRAQSLEETEPARSPSASRRVFDSPFRLTKIRDLPREMNKDTITLKDILGDPLIAECWEFNYLHDIDFLMAAFDPDVRHLVKVHVVHGFWKREDPNGLELQPNVYQEAASRFQNVTLHSAFMPEMYGTHHSKMMILLRRDDTAQIVIHTANMIIRDWTNMTQAVWLSPRLPLMEPSRCDARPEEVAAGSGAKFKIDFLNYLRAYDTRRTTCRPIIDQLSKYDFSAIRGSLIASVPGRHKLDDTSPTRWGWAAMEQALKSVPVSSRRSDIAIQISSIATLGPTDTWLKSTFFRSLSGGRPGGTLQQPPNFQVIFPTPDEIRKSLDGYSSGASIHTKVQSPQQVKQLAYLRPMLYHWANDSANGADPQEGGGGGERRREDYENDGGDDEGDSAVVVKEAGRKRAAPHIKTYIRYGDKSGPSIDWALVTSANLSKQAWGEAAVRGADGGATMRIASYEIGVLVWPGLYGEGAIMRGTFLTDSLGTEEVKEGTTAVALRMPYNLPLQPYGKGEVPWVATANYSEPDWKGQIWRHG

SEQ ID NO: 2892 - DNA, 1419 bp, Myceliophthora thermophilia
atgcccagcaaaggggtccacgtcttcacctacattgcagcgcacggctgctccatcgagctgtcggtaccgggacggactgttacggttaaggagctgcaccgcttctcggacgtcgcgctcgaggtagagtcgtcggagatcaaaagcctcttcgataagcgaggcaagttcatcttcaaggtcttccggaatggtaaacagatcacggagcaatggatcgacgtgaatgccatcacgggtaacgccagtggtggcaccatggagtccattgccgacacaccctccatcttccacgacgacctcatcgtctcgtacggcctgtacgaggccggcaagggccatgacctactgcccaatcgccaccagtgctacgtcaccgtcagccccaattatgaacggtggatggccaagctggcgcccccgggctccgagctggagaagaagcccttccgccggctcgttctgccctcggcccacgatgtgggcatgaacagcatggaaagcagcgacgcggtgctgcggtgcgtcggcggcgccgtcgtcggccaactcatcaacgacaaccgcgtcctgaccaagctcgccgacaagttgtcggccgacgccattgccctcatcgcgcccaacatcatctacagcctggccatcacccagaaagactccctcgaggccatgctcaagatcggcgcccgctacttcgagttccgccccgcgcgcctccacaccgccgtccgttccaagggcgccctccccgaccgcctgtacttccagcacagcgccatcccgggcatggcgtacgacgcctttctggccggcgtcgtgtccttcttgcgcgcccacccggccgagatcatcgtggtgcagctgcgctgggacggcgtgcccgacgcgtgcgccaagccgttggccgaggagaagaagcgctacctcgaggacgcgctgcgcccggccaagggcgagatcgtggccggcaacctgcaggacatgaagaagctgaccatcgagcagctgcgccgggaccgcaagcgcctcatcatgctcgacagcgtcgactcgctgtccacgtacacggacgagggcaacgccaccctcaccggggacagcatcctccaggccctgccccgcgtgctgacgcgggagaaccagcggggcaaggcatttattaacatccagtgccaggcgacagcctccaacatcacaaaggcggtcgtctactctgttctggaagccggcgccaccactagctgcctgttggcgaccaagggcttgtgcgaccacaagacgctgccctggtgcagggataacgtcctacgcacctgtgatccggaccagctggtcgtcctgatgaacgattttatagacggcgccacggctgacgttgccgtgcagctgagcagacaacggctggagaagtga

SEQ ID NO: 2893 - protein, 472 aa, Myceliophthora thermophilia
MPSKGVHVFTYIAAHGCSIELSVPGRTVTVKELHRFSDVALEVESSEIKSLFDKRGKFIFKVFRNGKQITEQWIDVNAITGNASGGTMESIADTPSIFHDDLIVSYGLYEAGKGHDLLPNRHQCYVTVSPNYERWMAKLAPPGSELEKKPFRRLVLPSAHDVGMNSMESSDAVLRCVGGAVVGQLINDNRVLTKLADKLSADAIALIAPNIIYSLAITQKDSLEAMLKIGARYFEFRPARLHTAVRSKGALPDRLYFQHSAIPGMAYDAFLAGVVSFLRAHPAEIIVVQLRWDGVPDACAKPLAEEKKRYLEDALRPAKGEIVAGNLQDMKKLTIEQLRRDRKRLIMLDSVDSLSTYTDEGNATLTGDSILQALPRVLTRENQRGKAFINIQCQATASNITKAVVYSVLEAGATTSCLLATKGLCDHKTLPWCRDNVLRTCDPDQLVVLMNDFIDGATADVAVQLSRQRLEK

SEQ ID NO: 2894 - DNA, 1521 bp, Myceliophthora thermophilia
atggccagacgcccatcgacccgacaatcgattcgaaaggcggcacaatcaaaggctgcagcgaccgagtccgagactcgtgcgggacaagaggtcgtttccgcgacttcggtcgaggtcaacggcacagtagtgacgacgacgaggacgaagacgacgacatccgccgccgatgccaaggtcgatgtgaaggtcgatgtgatcaagacgaaggcctcgaagcgcaagaccgctgccgccgagccggatctcgacggcgaggatatcgaaaacaccagcccggccgaggacgcaaacagccgcgaaagccaagaaacaaaaaagaagccggcggccaaaaagcgcaaaacggccaacaccaccaccgccaacaccgccaaggaggaggccgagggcatcaccatgccgctggcaccccgaacggccgtcgcgtcgctgaagcgggccatgtacatcggcgcccacgtgtccggggccgggggcgtccacaactcgatccagaacgccgtccacatcggcgccaatgcgttcgcgctcttcctcaagtcccagcgcaagtgggtgaacccgcccctggccgacgaggccaagacccagttccgcgccctgctcggcgaacacggctacgacgccggcaagcacatcctcccgcacgggccctacctcgtcaacctcgcgcagcccgacgaggccaaggcggcccaggcgtacggcagcttcctcgacgacctgcagcggtgcgaggccctgggcatcgccctctacaacttccacccgggctcgacggggggggagccgatggcgtcggcgtgcgcccgcatcgccgcgcagctgaaccgggcgcacgcggccacctcgtccgtcgtcacgctgctcgagaacatgtgcggcagcggcaacgtggtcggctcgcgcttcgaggacctgcgcgacatcatcgccctcgtcgacgacaagtcgcgcgtcggcgtctgcatcgacacctgccacgccttcgccgccggctacgacctgcgcaccccggacgccttcgcccgcaccatggccgagttcgactcggtcgtcggcctccgctacctgcgcgccctccacctcaacgacagcaaggcccccttcggctcccaccgcgacctgcacgccaacatcggcaccggcttcctcggcctgcgcgccttccacaacatcatgaaccacgagctgctgcagggcctgcccatggtgctcgagacgcccatcgaagagaaggggcccgacggcaagacggtggagaacaagcagatctgggccgacgagatcaagctcctcgagagcctgatcggcatggacgtcgagagcgccgagttcagggacaaggaggccgagctccaggcgaggggagcctccgagaggcagaagattcaagaccaggtcgacaagaaggccgagaaggacgccaggaagggtgccaaaaggggcccaaaggcgaaaggcaagggcaagggtaacaagaaggacgaggactcgtacaccgagagcgactag

SEQ ID NO: 2895 - protein, 506 aa, Myceliophthora thermophilia
MARRPSTRQSIRKAAQSKAAATESETRAGQEVVSATSVEVNGTVVTTTRTKTTTSAADAKVDVKVDVIKTKASKRKTAAAEPDLDGEDIENTSPAEDANSRESQETKKKPAAKKRKTANTTTANTAKEEAEGITMPLAPRTAVASLKRAMYIGAHVSGAGGVHNSIQNAVHIGANAFALFLKSQRKWVNPPLADEAKTQFRALLGEHGYDAGKHILPHGPYLVNLAQPDEAKAAQAYGSFLDDLQRCEALGIALYNFHPGSTGGEPMASACARIAAQLNRAHAATSSVVTLLENMCGSGNVVGSRFEDLRDIIALVDDKSRVGVCIDTCHAFAAGYDLRTPDAFARTMAEFDSVVGLRYLRALHLNDSKAPFGSHRDLHANIGTGFLGLRAFHNIMNHELLQGLPMVLETPIEEKGPDGKTVENKQIWADEIKLLESLIGMDVESAEFRDKEAELQARGASERQKIQDQVDKKAEKDARKGAKRGPKAKGKGKGNKKDEDSYTESD

SEQ ID NO: 2896 - DNA, 702 bp, Myceliophthora thermophilia
atgagccagcaatttcccaagtcggcttcgtcgagtcccgatggcaggcacgcaaaaatgcatgctgcatgcggggtgctgagttgggggagcttcgggctccaagacggacagacagaggaacttcggagccatgccaccaggccgtgcaacccaccccttatgctcaacttgtcgccttgcatcagccgttccgagtcacggcttcttcgcctttcctcgtacccgcactctgtgaccacccgacgcgtcgccgtggttgggtcgagacgcacgatccctcaggtggacggttggaggcgcactacctgccgtatgttggtgctaccatgctcatgcaaaggaacagcgcccgtcaatgtgatgcatcacaaaaaagctcatgggcctgcatgcgctgcgtggactgcggttggctgcatcatcccccatttccacgttggcgggtcttctgggtggctgaccgctggtgtggctttcactcgatcctcaccggatgtctcaggaaaccgattgggagaccactgcccatcttggcttgtgacggtggcgttcggtcaagagttcgtggcgcccctccgttctgtttctgcgcgggggggtgtctcccacagtcggaccggtccgaccaggaagtgtaatccgtgccgagcagtcatctttttgctctgcaaggaacttcagcaccacgcaacagcatga

SEQ ID NO: 2897 - protein, 233 aa, Myceliophthora thermophilia
MSQQFPKSASSSPDGRHAKMHAACGVLSWGSFGLQDGQTEELRSHATRPCNPPLMLNLSPCISRSESRLLRLSSYPHSVTTRRVAVVGSRRTIPQVDGWRRTTCRMLVLPCSCKGTAPVNVMHHKKAHGPACAAWTAVGCIIPHFHVGGSSGWLTAGVAFTRSSPDVSGNRLGDHCPSWLVTVAFGQEFVAPLRSVSARGGVSHSRTGPTRKCNPCRAVIFLLCKELQHHATA

SEQ ID NO: 2898 - DNA, 537 bp, Myceliophthora thermophilia
atgcacaaaacgcgccggctcgcctctacgtctaattaccctctgcacctggctgatagagacgtgccacactgcctgcaggcgacagtgagcaccgtacagcttagtcaaccccataaaccgggggaggagtccatcagagtcttcgagcaaatccagcatgaactcaagagatcccttgtacgcatccgtcatgaatacagaagtgagttgccaccacatcatagtcggtcgagaaatgttacttattctatgaacgcccggattgaactagagcacgaaccagagtgctttgctgctgcagagcacctgagtgatgcgcagctgaccgctttcgggccggacgacctcgatgaagtccgcatcgccgtttcagcatatggacttcacgtctttggcaaggtgcgcattccggctttgcccgacgagggcccagcatatgttcactttcgagccttcactggcggccctgatgacagggcgaccctgcacagcattcgtatgtccttgtccaaccccatcacaggggagttttga

SEQ ID NO: 2899 - protein, 178 aa, Myceliophthora thermophilia
MHKTRRLASTSNYPLHLADRDVPHCLQATVSTVQLSQPHKPGEESIRVFEQIQHELKRSLVRIRHEYRSELPPHHSRSRNVTYSMNARIELEHEPECFAAAEHLSDAQLTAFGPDDLDEVRIAVSAYGLHVFGKVRIPALPDEGPAYVHFRAFTGGPDDRATLHSIRMSLSNPITGEF

SEQ ID NO: 2900 - DNA, 297 bp, Myceliophthora thermophilia
atgccaggaacgagatcgattctgcacccacaacccgggtctttcgtgcgcatacactatgcaatggacctcgatgagccgccttcagatactgacaaccgtggcgtgtcgtccgccataacgatcgatatcgaccattgtcgtctgaccttccgccaggatcgacctgatagttgtaggcatgtcggtacatacaccacggtaaatttaccggtgcatttcttggcggctcaggcagcacctcgcgcagccgccaaaacagcatcggttgcttcctgcgctagcctactccgttga

SEQ ID NO: 2901 - protein, 98 aa, Myceliophthora thermophilia
MPGTRSILHPQPGSFVRIHYAMDLDEPPSDTDNRGVSSAITIDIDHCRLTFRQDRPDSCRHVGTYTTVNLPVHFLAAQAAPRAAAKTASVASCASLLR

SEQ ID NO: 2902 - DNA, 858 bp, Myceliophthora thermophilia
atgtctactcaccgcgattctgatttactatcctttttaccagcgcccgaccggggggcggcggcacccatagagggcttccgttcctcgtctgtctccttgccttttcgagcccctgaagtggcactgggcggctccggtggcctcttccggaggacgttgggctccgtcccagttcccgagagcgagtttctccttcctgtcacaaactctcgcaagctcgacagcgagctctcgctgttgcgtctctttcgaccgctccacggccatggagatctttgtggtggtggtggtgatggtggtgggggatcgtccgtcctggtggccatgacgacgccgacaactcaatgttggccggattcgagatctgaaatcgtaagtcgtagctggggtgaccaaaaactttccccttggcgcttggctactgccagggtgctggaacgccgcaacgcgcggcaggctattgtcgagctgggtttgcacgtcttagccgtacatgcttcgtctggacgtttggatgatcgttccgtgttctgctctgatggctaccatcaagtcctgcgctgcggcggtttgaagttggcggatgggccagatcgcgggcattatcaaacgggccagttttttgcttttcgagaaccttggcccactttcacagcctgctcccggttattgtctttggttctaatccggcccggccaaaacccgcgttcgtcagttgtctactccgcagtcgcgatcggacaggtaaaagaaaatgaggaatgcgtaaagaaaaaaggccgagaatgggttgatctgggtccttcgctcatgctcgtgtcggcagctggttgcgtcctggaaatacaacgttga

SEQ ID NO: 2903 - protein, 285 aa, Myceliophthora thermophilia
MSTHRDSDLLSFLPAPDRGAAAPIEGFRSSSVSLPFRAPEVALGGSGGLFRRTLGSVPVPESEFLLPVTNSRKLDSELSLLRLFRPLHGHGDLCGGGGDGGGGSSVLVAMTTPTTQCWPDSRSEIVSRSWGDQKLSPWRLATARVLERRNARQAIVELGLHVLAVHASSGRLDDRSVFCSDGYHQVLRCGGLKLADGPDRGHYQTGQFFAFREPWPTFTACSRLLSLVLIRPGQNPRSSVVYSAVAIGQVKENEECVKKKGREWVDLGPSLMLVSAAGCVLEIQR

SEQ ID NO: 2904 - DNA, 279 bp, Artificial Sequence
  Synthetic polynucleotide
  misc_feature (25)..(25): n is a, c, g, or t
atggaaaaagaagggctgctgtacntgcacgtcactcagctgctgtacggccaaggcggattcgcgaatgcgaaacgagacaggagttcagaggtgagcaagacagaccattcagatggggacggcaacagtgttgagtgggttgggtatctggccatcggtgcccaatccgaactaccgttacgctctgcgaccctcctctcccgcgaccctccgttcgcttcacccgagagagcgtggcgagatgtgcccgatcaggggaacgtccaaaacctctaa

SEQ ID NO: 2905 - protein, 92 aa, Artificial Sequence
  Synthetic polypeptide
  misc_feature (9)..(9): Xaa can be any naturally occurring amino acid
MEKEGLLYXHVTQLLYGQGGFANAKRDRSSEVSKTDHSDGDGNSVEWVGYLAIGAQSELPLRSATLLSRDPPFASPERAWRDVPDQGNVQNL

SEQ ID NO: 2906 - DNA, 279 bp, Myceliophthora thermophilia
atgtgccgctactacgcccatcagcacgcgtgcaagcacacgcaattctccttcgccgccttctgcgacccggcctcgctgatccagaacccgtgcggcgagcgccacatctgggccaccatcgtgctcggcgacccgtgcgacgattgcagagccgccgtgacggcagcggcggcgggggcgactggcggaggagaaggaggagatagtgggaatcgggggggtgcgtatgagcgcggatacccgtttgcgcacggctacggccaagggaggcaatga

SEQ ID NO: 2907 - protein, 92 aa, Myceliophthora thermophilia
MCRYYAHQHACKHTQFSFAAFCDPASLIQNPCGERHIWATIVLGDPCDDCRAAVTAAAAGATGGGEGGDSGNRGGAYERGYPFAHGYGQGRQ

SEQ ID NO: 2908 - DNA, 618 bp, Myceliophthora thermophilia
atgggtacctccccagtcaagagacccaagatacatgagggaaccggggatgtgggctcatcgcaacggctgcgtcccgcttttgagggcctgctccatgaggctctgctagtccagggggtcgtggagctcggaagccatgagcacctcaagacgcacagtcatgccgccaccacgacgtctactgtcttccgcctttgtccgtcttcgcccgcgtccacagtggcctggtcctttcgtcgcaacgctgctctctggagaccgaactctgccgatcagcccccaacggggacaccggtggcgcccagcgcggggagtgctgagatcttggcgccagacaagccgtctactacagacgcttggccgcgttcgtcaaggatgtgctgggttacatgcattcgtcgggcgaggctgaggaccgaaaaagaacttttggaggcagactggcggagggagaccgagcgacttgccctgcagatccgcgctcagttcattttacgcaaaactctcccgggagcacttgcctgcccgcgctgcggtcccgagagagcgggaaggcggctcttttggttctgcaaggacacggaacggaaggcgcaaaagaaaggaaacaattga

SEQ ID NO: 2909 - protein, 205 aa, Myceliophthora thermophilia
MGTSPVKRPKIHEGTGDVGSSQRLRPAFEGLLHEALLVQGVVELGSHEHLKTHSHAATTTSTVFRLCPSSPASTVAWSFRRNAALWRPNSADQPPTGTPVAPSAGSAEILAPDKPSTTDAWPRSSRMCWVTCIRRARLRTEKELLEADWRRETERLALQIRAQFILRKTLPGALACPRCGPERAGRRLFWFCKDTERKAQKKGNN

SEQ ID NO: 2910 - DNA, 588 bp, Myceliophthora thermophilia
atgatctcctcaatgtggctcatggataccgcggcagccgtctctaacaggcgccctgatcctctgaggcaaggtgcagacgagcctgggcagccgtggtatgtcgctcccgtgcttccgacgcccacccaacgtgcatatgtcggactcgctagcgtcaaagaaggcgagttgaaggcctctcaggcccgctgttgcacttcttcgttgaccggtgaggagttccgggttcccatccgccccgaaagcaaaggcctgcatggcagcgttttgcatggtagcgttttgcaggcaaaacaaacgactatttcatttgacttcggtgaaactctgcaatggctcgccgatgtcttcgccctgtgtggtcggcagaagcggtcgcagtccaacacgataatcgaggcttgcaatgcgagagacggtcagcatacggtgaggctgattaccaatccggccagcaacggcctggggttcggtttctttgaggcttcgacgatccgcagccgttcatgcaaggctgtcggcgcaaacccaaaccctcaaaccccgatgagtcacgcctgtggcggcctcagatcgtacgtgtaa

SEQ ID NO: 2911 - protein, 195 aa, Myceliophthora thermophilia
MISSMWLMDTAAAVSNRRPDPLRQGADEPGQPWYVAPVLPTPTQRAYVGLASVKEGELKASQARCCTSSLTGEEFRVPIRPESKGLHGSVLHGSVLQAKQTTISFDFGETLQWLADVFALCGRQKRSQSNTIIEACNARDGQHTVRLITNPASNGLGFGFFEASTIRSRSCKAVGANPNPQTPMSHACGGLRSYV

SEQ ID NO: 2912 - DNA, 6822 bp, Myceliophthora thermophilia
atggagcccgttatcgacgagcgctgggccgagaggccggcgttcctcctgtttggagatcagtcgctcaactgccacaccttcctggctcacttcttccgcaagcccgccatggaccagggccacctggcgaaggccttcttgcttcaggcctttcatcatctgaagaaactcatcgacaagatgcccccggccgagagagcaatgttgcccgaatttaggacactgcagcaactcaatgagcgataccacagtgccacgctgaagcacgcaggcatcgacgcagctttgctggcaatggctcagatcgtgcactatatcaatcactctgaaaaacactgcgaggacatcacacagcctcaccagacctttctcattggactttgctccgggctttgggcgtcatccgctatatcggtgtcaccgtcgttgccggacctcgtccatgtaggggttcaatttgtcctattcgctttcaagacgggcacatacgtccactcggtttcgcaacagttgagcccggcattcgaccggtcggagtgctggacgtacgtcttctccgggctggagcaggacgatgtcgtagccaggctagatgccttcaaccgcaacatcccgcccgcttgtcgcgcatacgtgagtgcggtatccgagtacaacattgcaatatccggaccgcccagcactctagacacgctggtcaagaacgagatcttgccagcggaaccggtctccatccccgtccatggtccctaccacgcgccgcacctgcacgccgaggtagacgtcaaggctttgctagacctggataagccagagacgcgggacgcactgtacatgacaagtcctcggtcacccatcatgaactgcggcgccggaacgtggtttaccgagacggacacgctgtcgctcgtggccgcggttgccactaccatcctgaaagagacattggactttaccaaggtgcttaagggctgtgtcgaagctgctcgcgaatttaaattcgaagacaggagatgtctcatcctccccctcggtccgactcagaacgcgggaacgctgaagaaactcctcgaagaggaagcaaagttgaaggtgaagactcgcatgccgccgccctactcaccagagagtacggcatccacggtaggaaaccagggcttgattgggagacccaaacttgccatcgtcggcatggccggccgcttccccgatgcccccagccacgaggcgctttggcgattgctggaacagggtctcgacgtgcaccgtgaggtcccccccgatcgcttcgatgtgaagacgcacttcgacccgaccggccagaaggacaacacgagccacaccccgtacggttgttggattccggagccgggcctcttcgacccccggttcttcagcatgtcgcctcgcgaggccgcccagaccgacccgatgcagcggatggcgctgacgaccgcatacgaggcactggagatgtcaggctacgtccccaacaggaccccctcaacgaggcttgaccggatcggaacgttttatggccagacgtccgacgactggcgcgaaatcaatgcggcacagacgattgacacgtatttcatcacgggcggcgttcgcgcctttgggcctggccggatcaattaccatttcggattcagcggacccagtctcaatatcgataccgcttgctcttccagcgcggcagcgatgcaggtggcttgcacggctctctgggccggggactgtgacacggccgttgttggcggcctgtcgtgcatgacgaacccggacatcttttccggactcagtcgaggccagttcctctccaagaacgggccgtgttccaccttcgacaataaggctgatggctactgccgtgccgatggctgcgcctctgtcgtcgtcaagcgtttagatgatgcattggccgacaacgaccggattcttggtgtcatcctcggcaccgccacgaatcactcggcagacgccatctccatcactcacccgcatggcccaacgcaggccatcttgtcaaccactgttctagacgaggctggcgtcgatcctcatgatgtcgactacgtcgagatgcacggaaccggtacgcaggcaggggatggcaccgagatgcggtcagtcaccgatgtctttgcccctgcagaccgcccaaggccccacgacaggccgctgttcttgggttcggtcaaggcaaacgtcggacacggagaggccgcctccggcgttaccgcgctcatcaaggtcctcttgatgctcgaaaagaacctcattccgcgtcacgttggtatcaagccaaacagcatcattaaccagaccttccccaaggatctctcggaacgaggcgtcaacatcgcattccacacgacgcccttcaagaggagagacggcaagccgaggcgcgtcttcgtcaacaacttcagcgctgcgggtggtaacaccgggattctggtagaagaccctccgaagcctccgccggctaagcctgatcctcgcagtcaccacatcgtcacgttgaccgggaaggccagggcttccttgctgatgaacgccgagcggctcctgcgctggatggaacagcacccggaaacgcctgtctcgcacatatcatacagcacgacggcgagaaagatgcagcattattggcgaataagcgtgacaggttccgagattggagacatccagaaggcaattcagaacgcccttggcgagggcaacttttcgcctgtcaaagccgagcagcctaaagtcgtcctgatgttcactggtcaaggcacgttctatgccgcgctgggcaaggaattttatcggaaccactcggtgttccgcaggagcattgacggctttgttaagttggctcgcatgcagaacttttcatctttccttgggctcatcgacggcagcgagccagacgtgtctcggctgtcggcggttgagctgcagcttggtttggtatgcttccagatggcgctcgcccgactgtggatgtcgtgggggatcaatcccgccgccgtcgtgggccatagccttggagaatatgccgctctcgagatcgccggcgtgctctccgccagcgatgtcatctacctcgtcggttctcgtgcgcaactgctcgaaaaggcatgcgaacccggcacccacggcatgctcgccgtcacgggtgcacacgacgccatcatggaggccatgggtcggcgggcccttgggctcaatgtggcctgcatcaacgggccccgtgagactgtccttagcggtccggttgccaagacgttggaggttgcgtcgttcctgtcccctcgcggcttcaggagcactccgttgaaagtagcctatgctttccactccccacaggtggaggtcatcatggatgactttgagaaactcgcgcaaggagtcacgtataatgttcccaaagtccccgtcatctcgacggcccgtggaaaggtgattgtggccgacgaatttgacgccaggtatctccgcgagcattcacgcaacaccgtcgatatgctcggcgggctcgttgatgctcagaggaacggcactattgatgccgaaactgtctggctcgagatcggcgctcaccccgttcttacgaccatggtcagggctacctttggcaccactacggtggcagtccctaccctgcgccgtgatgaaccgtgctacaagacggtgacggagagcatttccacgcttcatagccagggtgtcgacttagacttcaacgagtatcaccgcgaattttccgactctgtgcgcctcctggatttgcccagctacgctttcgacgaacgtaactactggatccaatacacgggcgattggtgcctgatcaagcacagaacagcggcggccagcgagtcggagtcgaagcctcgatggccgaccatttccacgacttcggtacagaaagtcgtcaaggtagaagtcgacggcgacgtggccacggtggaaattgagtccgacctccaccaggagcagctccggaatgccgtatctggccatcgggtcaacggggccccgctgtgcccatcatctctctatggcgatatggccatgaccgtgtgcgactatgcctacaagctgctgcgtcccgagagtcgagacatcggctgtaacgtctcaaacatggaggtccccaagacgctcattcttgatgaaacagctaaaagtcacatcctccgcctgacggtgacggccaatgcaaaactcggcttcgccgacttgacctggcacacgggcgacggcaagaggaagatcaaccatgcccactgcaaagtgtactacggcaaccgtgatgactggcagagcgagtttgacagagccgcctatctcgtcaagtcccgaattgacttccttcaggaggctgagaagagggggaaagcgtcaaaggttggccgtggcctggcctacaagctcttctccgccttggtcgactacgccccgcgttatcggggcatggaggaggttacccttgacagtgccacttgcgaggcgactgccaggattcgcttccagacaacggagcaggatggtaccttctacttcagtccctaccacattgacagcgtctgtcacatctctggtttcatcatcaacggcaccgacgccgtggattcccgcgaacaggtctttatttcccacggctggggctccatgaggttcaccgagattccggacgccaacaaggagtatcgcagctatatccgcatgcagaagatgaaggatagcaagatgatggccggcgacgcctatgtcttcgacggcgacaagatcatcggcatgacgggcgacatcaagttccaatgcattccgcgccatgtcctcaacacggtgcttcccccacgaggcgcacaagcggttcggacccctgctgctgctgctgctgctgctgctgctgcccgaccgcccaccacgaccgccgcgccaagcaagcagacaagcaaggaaccaagcaagtcaccaaccaagccgccaaacaagtctgcggccaccaagacgaagaagaaggagaagactgtgacaccctctaacatacgtacggtggaccagaatctgaagagcgtggtcacggcagtcatggacatccttgtccgggagttgggctgcagccctgacgagcttgctgacaacgtttccttcaatgatctcggcgttgattccctaatgggcttgacggttactggcaagttccgtgaagagttgtctttggacgatattgactcggacgtcttccttgaacacaccactattggcgcgttcaagcagtacctggcgagattcgagtctcggccgggtcgccaggaaagcgtgccgtctcgaggctcagaagtgtcgccggacgacgagtcccctgagcttgactcagattcggacgtaacgacgccgcccgacgacagcgaaacccattcatccaaggccggcgaaccggccgaagccccttcagctgacgagggtgcaaaactgcgggacacacttcgccgggccattgccgaggaagcaaaggttgaagtcgaagaagtccttgccgtgcgggatctgcccagtcttggcgtcgattctatcatgggtctggctatcgttggccgtgttctcgaggagattggtgtcgctctggagaaagacctcttcctcacgaacacaacgctcaaagagatagaacgcgccctcggtattgaggacttgcccaagaagtcttccaaagccaaacaggaaccgaagcaacaacaacacgaacaggcaccacccaggaaggaagccaggcaggagcccaagcaagaatccaagaaggaaacgaaagaggaacccaagcaggagcctaagaaggaaaacaagaagggacctgaagaggagtccaagcaagccgagaagtctcggagacagaccgaggaatcttcaaaaacgggccctcctgtcaagcagcatccgaggattggtttggaggaacccgcccctccaaaacctcctaggcccacagaaatcatggacgattatccacaacgcacggccagatctgtccttctgtctgggacatcaaagtgttccaagcagctgttcatgattccggacggcagcggctccgccacatcgtacacggagattgccaaggttgggggtgattggcgtgtctggggcctcttctctcccttcatgaagacacccgaggagtatgtctgcggagtgtacggcatggcggcaaaattcatcaccgagatgaaacgtcgccagccctccggcccatattctgttgcggggtggagcgccggcggcgtcattgcgtatgagatggtgtatcaattaaccacgtccggcgaggaggtagagaaccttattctcatcgatgcccccgccccggtcactatcgaaccgcttcctcaaggccttcacgcatggttcgcttcgatcggactgcttggcgaagattctgggaaagatgggggtgagaagaaggtaccggagtggcttcttccccattttgccgcctccatcacggccctgagcaattactatgccgatcccatcccgaaggacaggagccccaagaccatggccatctggtgtgaggacggcgtgtgccacctgcccacggacccccgaccggagccgtatccgaagggccacgccctctttcttctggataaccgcaccgactttggaccgaaccgatgggacgagtatctggacgtgaacaagttgaagctcagacacatgcctgggaatcatttcaccatgattcacggggagctggccaagcaactggaaggcttcatcagggaggcccttatagacgaaagctgcgactga

SEQ ID NO: 2913 - protein, 2273 aa, Myceliophthora thermophilia
MEPVIDERWAERPAFLLFGDQSLNCHTFLAHFFRKPAMDQGHLAKAFLLQAFHHLKKLIDKMPPAERAMLPEFRTLQQLNERYHSATLKHAGIDAALLAMAQIVHYINHSEKHCEDITQPHQTFLIGLCSGLWASSAISVSPSLPDLVHVGVQFVLFAFKTGTYVHSVSQQLSPAFDRSECWTYVFSGLEQDDVVARLDAFNRNIPPACRAYVSAVSEYNIAISGPPSTLDTLVKNEILPAEPVSIPVHGPYHAPHLHAEVDVKALLDLDKPETRDALYMTSPRSPIMNCGAGTWFTETDTLSLVAAVATTILKETLDFTKVLKGCVEAAREFKFEDRRCLILPLGPTQNAGTLKKLLEEEAKLKVKTRMPPPYSPESTASTVGNQGLIGRPKLAIVGMAGRFPDAPSHEALWRLLEQGLDVHREVPPDRFDVKTHFDPTGQKDNTSHTPYGCWIPEPGLFDPRFFSMSPREAAQTDPMQRMALTTAYEALEMSGYVPNRTPSTRLDRIGTFYGQTSDDWREINAAQTIDTYFITGGVRAFGPGRINYHFGFSGPSLNIDTACSSSAAAMQVACTALWAGDCDTAVVGGLSCMTNPDIFSGLSRGQFLSKNGPCSTFDNKADGYCRADGCASVVVKRLDDALADNDRILGVILGTATNHSADAISITHPHGPTQAILSTTVLDEAGVDPHDVDYVEMHGTGTQAGDGTEMRSVTDVFAPADRPRPHDRPLFLGSVKANVGHGEAASGVTALIKVLLMLEKNLIPRHVGIKPNSIINQTFPKDLSERGVNIAFHTTPFKRRDGKPRRVFVNNFSAAGGNTGILVEDPPKPPPAKPDPRSHHIVTLTGKARASLLMNAERLLRWMEQHPETPVSHISYSTTARKMQHYWRISVTGSEIGDIQKAIQNALGEGNFSPVKAEQPKVVLMFTGQGTFYAALGKEFYRNHSVFRRSIDGFVKLARMQNFSSFLGLIDGSEPDVSRLSAVELQLGLVCFQMALARLWMSWGINPAAVVGHSLGEYAALEIAGVLSASDVIYLVGSRAQLLEKACEPGTHGMLAVTGAHDAIMEAMGRRALGLNVACINGPRETVLSGPVAKTLEVASFLSPRGFRSTPLKVAYAFHSPQVEVIMDDFEKLAQGVTYNVPKVPVISTARGKVIVADEFDARYLREHSRNTVDMLGGLVDAQRNGTIDAETVWLEIGAHPVLTTMVRATFGTTTVAVPTLRRDEPCYKTVTESISTLHSQGVDLDFNEYHREFSDSVRLLDLPSYAFDERNYWIQYTGDWCLIKHRTAAASESESKPRWPTISTTSVQKVVKVEVDGDVATVEIESDLHQEQLRNAVSGHRVNGAPLCPSSLYGDMAMTVCDYAYKLLRPESRDIGCNVSNMEVPKTLILDETAKSHILRLTVTANAKLGFADLTWHTGDGKRKINHAHCKVYYGNRDDWQSEFDRAAYLVKSRIDFLQEAEKRGKASKVGRGLAYKLFSALVDYAPRYRGMEEVTLDSATCEATARIRFQTTEQDGTFYFSPYHIDSVCHISGFIINGTDAVDSREQVFISHGWGSMRFTEIPDANKEYRSYIRMQKMKDSKMMAGDAYVFDGDKIIGMTGDIKFQCIPRHVLNTVLPPRGAQAVRTPAAAAAAAAAARPPTTTAAPSKQTSKEPSKSPTKPPNKSAATKTKKKEKTVTPSNIRTVDQNLKSVVTAVMDILVRELGCSPDELADNVSFNDLGVDSLMGLTVTGKFREELSLDDIDSDVFLEHTTIGAFKQYLARFESRPGRQESVPSRGSEVSPDDESPELDSDSDVTTPPDDSETHSSKAGEPAEAPSADEGAKLRDTLRRAIAEEAKVEVEEVLAVRDLPSLGVDSIMGLAIVGRVLEEIGVALEKDLFLTNTTLKEIERALGIEDLPKKSSKAKQEPKQQQHEQAPPRKEARQEPKQESKKETKEEPKQEPKKENKKGPEEESKQAEKSRRQTEESSKTGPPVKQHPRIGLEEPAPPKPPRPTEIMDDYPQRTARSVLLSGTSKCSKQLFMIPDGSGSATSYTEIAKVGGDWRVWGLFSPFMKTPEEYVCGVYGMAAKFITEMKRRQPSGPYSVAGWSAGGVIAYEMVYQLTTSGEEVENLILIDAPAPVTIEPLPQGLHAWFASIGLLGEDSGKDGGEKKVPEWLLPHFAASITALSNYYADPIPKDRSPKTMAIWCEDGVCHLPTDPRPEPYPKGHALFLLDNRTDFGPNRWDEYLDVNKLKLRHMPGNHFTMIHGELAKQLEGFIREALIDESCD

SEQ ID NO: 2914 - DNA, 333 bp, Myceliophthora thermophilia
atggttgacggccagcgtgcgcacggctgcgtgttatcgagcgtcggtacgtctagccaacatcccgtagacacgacgaccaagcgtcttgagaatgcaacaacgtctcggaacctggcacgcatcttccgccgcaggtcggcagacgccgcctgggcaataccacccctgtccaggccctttccccgcaggcagagccgcgctcttcctttcatggttattcaggaacgtggcttccgagattctcgcctgttctcccccagtcaacctgccgaccgtaacccggttccaccaccgcggactgtccgcaaaacctggttcgcccgagattaa

SEQ ID NO: 2915 - protein, 110 aa, Myceliophthora thermophilia
MVDGQRAHGCVLSSVGTSSQHPVDTTTKRLENATTSRNLARIFRRRSADAAWAIPPLSRPFPRRQSRALPFMVIQERGFRDSRLFSPSQPADRNPVPPPRTVRKTWFARD

SEQ ID NO: 2916 - DNA, 2157 bp, Myceliophthora thermophilia
atgccgcaggtgaaagcagagacgatggggctatccagtagcgaggcggccgacgctagtcatgcaatggcgggtgatgcgattgtcgatgatgcgccggcacagtcacctgcaactgcgcctgtacctgcacctacacctgcgctgcaggtcattgtcttgcacaccacaccggattctgcctgttttccagctcctgctgtcccctacagaatgctcaataacggcacagtctctgctactgctgtcgcggtcgaacgaacgcttttttcttccctctcggccgagtggcctgctggacctgttgctgggcattggcatgctcaagcccggttgtgtggatccccgtttcggggccatgcaggtctagacacagtcccgggctccggtggagggcctttagaaaacaatgtgacggccttccttgtgcgctccgttgcgtcagggtgggccaggggctcagttgttgccgttgacgccggagtacacctcagcgccatcaagacaatactagagcaaacgcaaccggcaaaactaggacagccaggtggccctgcattgccgcatacgctcaccacgggtccttttgcgggcctcgaagtccatcatgccacggccgatgcaaacgccgccgaaatccacaagactctaatagaaacatacctgataacacaccctcacctggaccatatcgcagggttcgtcatcaacacggccggcttatcaggctcccgaccaaagaaggtcgccggactcccaagcaccatcactgccttgaagacacacgtcttcaacaatgtcatatggccgaacctgagcgacgagaacaacggtgctggacttgtcacctacatgcgactcgtcgaaggcgggtctccagcgcttggagaaggagaaggaaggggctacctcgaagtctgcagcgggcttgctgtcaaggcatggagcgtcagtcatggccactgcatcgagagacacagtcatcgcggtagcagcagcacccgtcatggcagtttcgacgcctcgtcgatgggccctggtcctccgcaagtcgtgccgactccttcccgcaacatcccgcaacatacgtctttgcccaccaacatcggcgcctacttgcaacagcacgagcgcatacagtcttcgccggccagcaggcgcggcagctcgttctcggttgcaccgcccatcgatgacacagtctgcgtctacgacagctccgtctactttgtccgggacctcgccacgggccgcgagatcctcatatttggcgacgttgagccagacagcatcagtctctcgccacgcaaccggcaagtttggcaggaggtggcgcccaggatcgtctcgggcgacctggccgccatttttatcgagtgtagctacgacgattcgcggtgcgatgagcgcctcttcggccacctcacccctcggttcgtttgcgaagagatgatagcgctggcggaggaggtcattgcactgcggctagaaaaagagagagtcatgtctggtggccgagtcggcgccgaaaggaaacgcaaacgcctcagcgatgagggctccctgccgaagcgcaaaaacactcctcagccaagagggccaatctcggccgccgatatcccactttcccctcggagcatcgaccctagctggcacatcaagcccgctgtcaaccccgtctccgcctatacgtcggacttccgagaccgcagccaagaccgcatcccgaaaactatcccgcttccgacacatcccctacggagcacaaccactgtcgaacccaacgccgctgaggcgaaaggacaagaccaagatgcgacatcgcgggcagtgcccgagccgagccccacgccgatgtcggcagcaacatcagcaacggcggcatcgacggccgtcacgccgctggccgtcgccacgtctcagctacacctgctacagcaggaaaacgacgagagtcactcctcctcctccactagtccttccctgcggaatgcgctcagggggctccaggtggtggtgatacacgtcaaggaaacgatgcttgacgggccgagcgccgggaacgtgatattggaggagctgagggcgcacgagcgggaggcgggcctgggaatcgagttctcgatcagtgaggcgggaagtcagtatttcttttag

SEQ ID NO: 2917 - protein, 718 aa, Myceliophthora thermophilia
MPQVKAETMGLSSSEAADASHAMAGDAIVDDAPAQSPATAPVPAPTPALQVIVLHTTPDSACFPAPAVPYRMLNNGTVSATAVAVERTLFSSLSAEWPAGPVAGHWHAQARLCGSPFRGHAGLDTVPGSGGGPLENNVTAFLVRSVASGWARGSVVAVDAGVHLSAIKTILEQTQPAKLGQPGGPALPHTLTTGPFAGLEVHHATADANAAEIHKTLIETYLITHPHLDHIAGFVINTAGLSGSRPKKVAGLPSTITALKTHVFNNVIWPNLSDENNGAGLVTYMRLVEGGSPALGEGEGRGYLEVCSGLAVKAWSVSHGHCIERHSHRGSSSTRHGSFDASSMGPGPPQVVPTPSRNIPQHTSLPTNIGAYLQQHERIQSSPASRRGSSFSVAPPIDDTVCVYDSSVYFVRDLATGREILIFGDVEPDSISLSPRNRQVWQEVAPRIVSGDLAAIFIECSYDDSRCDERLFGHLTPRFVCEEMIALAEEVIALRLEKERVMSGGRVGAERKRKRLSDEGSLPKRKNTPQPRGPISAADIPLSPRSIDPSWHIKPAVNPVSAYTSDFRDRSQDRIPKTIPLPTHPLRSTTTVEPNAAEAKGQDQDATSRAVPEPSPTPMSAATSATAASTAVTPLAVATSQLHLLQQENDESHSSSSTSPSLRNALRGLQVVVIHVKETMLDGPSAGNVILEELRAHEREAGLGIEFSISEAGSQYFF

SEQ ID NO: 2918 - DNA, 1926 bp, Myceliophthora thermophilia
atggcagccccagcaactgccagtcagcatccacttccggacggcagccatcaggccggcggaggagtgtcggggaaaacgcagacagtcaggaccgtcaacggggcggtcctggctcacttgcgacaagtctacgcatctcatgccggtagtgccaccgagtggagtcccgaaaagaaggcggcttttctgaaggatattcagcatgacaccgaagctgagagcgctcccgagctggccagcggcaaggcctgggacttcaacgagttcctccggtacatgacttcgtctatcacgaacgcggttgcgcccccccatgaggaagacctctcctggccgctgtcgagctactttatcagctcgagccacaacacctacctcacgggcaaccagttgtcgagtgactcgagcgccgacgcctacaaaaacgtcctcctgcgcggctgccggtgcatcgagatcgatgtgtgggacggtgacgactccgatgatgacggcgagactagtagtagtagtagtagtagcagcagtgacgacgaagagaccaaggagaagcgaaagtcgcgcttcagcaaagtgacgggcaagctgcccaaatcgctgaccagccggttcgagaagacaagcctggcccccacggtggtgccgactgaggcaccaagcacgactccaccggcgaacccgctgcaaaaggtctcgagcgggaaggagccgagggtccttcacggatacacgctgaccaaggaggtgtcgttccgcgaggtgtgcgtcgccatcagggactacgccttcgctgtgaccgacacgcccttgatcgccagcctggaggtgcactgcagccacgaacagcaagagaccatggtggccatcatgcgcgagacgtggggcgacttcctcctaccggaacccaaggaggacgccaagcacctgccctcccctgccgagctgcgcggcaagatcctcgtcaaggtcaagtatgtcccgcccgatgctgaagaggaggaggaggaggcgctcccgggcgacaaccagacggccaaggccaagaaaccgtccaagatcatccaggcgctgagcaagctgggcatctacacgcgcggcgtctcgttcaagagtctgacgcagcccgaggcaacgatgccgacgcacatcttctcgctctcggagaacggcgtcatggaggtacacgagaagagcgcgcgcgagctgttcgagcacaaccgccgctacctgatgcgcgcctacccatccggcctgcgcatccgatcgtccaacctcgacccggccgtcttctggcggaagggcatccagatcgtcgcgctgaactggcagaactgggacgagggcatgatgctgaacgagggcatgtttgccggcaccagcggatacgtcctgaagcccgaaggataccggatcgacaagccacttccggccccgtccactccggaaaaccctcaggccaccgctgtgaagcactacacgctggacctaaccgtccaggttctcgccgcgcaatccctgcccctgccgcccggcgacgacaacccgtcctccttccgcccctacgtcaaggtcgagctccacgtcgaagaacccggggagcggctggacaaggacgccctgccggaggacgggagggagaaggagggcgagtacaaggccaagaccaagtccaggaaggggtgcgacccggactttgacgggcaggagctccggttcgagggcgtccccggcgtcgtgccggagctgtcgttcgtccggttcctggtgagggacgacgaggtcgggagggactcgctcgcggcgtgggcgtgcgtgcgggtggaccggctgagggaaggcttcaggttcgtgcatctcgtcgacgccgaaggggtcgagacggagggggcgatcctggtcaaggtcgggctgaagttgagatga

SEQ ID NO: 2919 - protein, 641 aa, Myceliophthora thermophilia
MAAPATASQHPLPDGSHQAGGGVSGKTQTVRTVNGAVLAHLRQVYASHAGSATEWSPEKKAAFLKDIQHDTEAESAPELASGKAWDFNEFLRYMTSSITNAVAPPHEEDLSWPLSSYFISSSHNTYLTGNQLSSDSSADAYKNVLLRGCRCIEIDVWDGDDSDDDGETSSSSSSSSSDDEETKEKRKSRFSKVTGKLPKSLTSRFEKTSLAPTVVPTEAPSTTPPANPLQKVSSGKEPRVLHGYTLTKEVSFREVCVAIRDYAFAVTDTPLIASLEVHCSHEQQETMVAIMRETWGDFLLPEPKEDAKHLPSPAELRGKILVKVKYVPPDAEEEEEEALPGDNQTAKAKKPSKIIQALSKLGIYTRGVSFKSLTQPEATMPTHIFSLSENGVMEVHEKSARELFEHNRRYLMRAYPSGLRIRSSNLDPAVFWRKGIQIVALNWQNWDEGMMLNEGMFAGTSGYVLKPEGYRIDKPLPAPSTPENPQATAVKHYTLDLTVQVLAAQSLPLPPGDDNPSSFRPYVKVELHVEEPGERLDKDALPEDGREKEGEYKAKTKSRKGCDPDFDGQELRFEGVPGVVPELSFVRFLVRDDEVGRDSLAAWACVRVDRLREGFRFVHLVDAEGVETEGAILVKVGLKLR

SEQ ID NO: 2920 - DNA, 1275 bp, Myceliophthora thermophilia
atgagtaaacctggtttctcatttggcctcaaaaaggccggccctgcaaaacctgctcccgcgccccgaaaacccgcgccctttggcgggggcgacgacgacggctcgggagacgagtcagggccaaagaacgccgcgcaggtttcggagctcgacgtattcaacacatcatcagaaccctcggcacccagcgacacgccggaccggaggaaaaagccgacctcgaagcccctcaagccaccacagccgcccgtgaccgcgccagaagccaaccaattcaccgacctctcgagcgccctcacctcgcgcaaatacgccgccgaggctgccgaggccgatccgtccatctacgactacgacgccgcgtacgactccttcaaggcggccaaggcggccgccaagaaagccgccgagaacggcggcgaggcgggcggcggtccggagaagaagccgcgctacttccaggcgctgctcagcgccgccgaccagcgcgagcgggaccggcagatcgccgaggagcggcggctgcagcgggagcgggcggccgagggggacgcgttcgcggacaaggagaagttcgttacggaggcgtaccgccggcagcaggaggagaaccggcggctgcgggaggaggaggagcgccgggaggaggaggagcgcaagcggaacgccggccgcgggctggccgacttctacaagggcatgctcgagcgcggggagagggagcacgcggcgctggtcagggctgcccaggagggggtgcggccgccggcggcgcgggatggtagcggcgaagggggacaggaggaagaggaagaggaagaaaagagcgcggcggatcgggcgagagagatcaacgccaagggtgggaatgtgttgatcaacgacgagggcgaggtggtcgataagaggcagctgttgaagggcgggctgaacgtggcggccaagaagaaggccgaggtgcagcgggagaaggagaggcaggcacaagccgcggctgcgtcggcgagggtgggagcgggcgcgcagctcatagggggggtgtatgccgtctgcggtaagagggcgatgcgggagcgccagtcgaagatgctggaggcccagctggaggagtcgctcaagcggtcgaggcaggaggccgaggaggaggcggccaaggtgcagcttgccagcaagagcaggaagaccgaggccgagatctcgagcgccagggagaggtacttggccaggaagagggctgcggaggaggcgaagaagaatggcgaagtcccctga

SEQ ID NO: 2921 - protein, 424 aa, Myceliophthora thermophilia
MSKPGFSFGLKKAGPAKPAPAPRKPAPFGGGDDDGSGDESGPKNAAQVSELDVFNTSSEPSAPSDTPDRRKKPTSKPLKPPQPPVTAPEANQFTDLSSALTSRKYAAEAAEADPSIYDYDAAYDSFKAAKAAAKKAAENGGEAGGGPEKKPRYFQALLSAADQRERDRQIAEERRLQRERAAEGDAFADKEKFVTEAYRRQQEENRRLREEEERREEEERKRNAGRGLADFYKGMLERGEREHAALVRAAQEGVRPPAARDGSGEGGQEEEEEEEKSAADRAREINAKGGNVLINDEGEVVDKRQLLKGGLNVAAKKKAEVQREKERQAQAAAASARVGAGAQLIGGVYAVCGKRAMRERQSKMLEAQLEESLKRSRQEAEEEAAKVQLASKSRKTEAEISSARERYLARKRAAEEAKKNGEVP

SEQ ID NO: 2922 - DNA, 531 bp, Myceliophthora thermophilia
atgtcagcgctcaatggaaaacatgctcacctttatatctgtggagagcactctcctcgccatcgcagggataataaggttgacaaacaagcgatggccagctggctcatctcgtcgcttctgaccgccgccagcctagcattgctggtgttgccgatcgacgcctcgccctcgccggcgcaccttcgatcgtcgataacattcagagacaacagcagcaccgtcccggttgtcagagtattgaacggctccactgcatcggctacggcggtgacaatgtcggatacgagctctccgaggactgcctgtacctcaacgtcgtccggcccgccggcatttcggagacggctggcctgcctgcgcgccctccagctcgacgacctgcaccgggcgctcaacagcatcaccaccaccgccgtcgacggcgtccccctcgcccaccggttcccgcccatcctggacggcgacttcgtcgccgactacccgtccaagcagctgcgcgagggcgcttcccccgagtgcgcgcgctga

SEQ ID NO: 2923 - protein, 176 aa, Myceliophthora thermophilia
MSALNGKHAHLYICGEHSPRHRRDNKVDKQAMASWLISSLLTAASLALLVLPIDASPSPAHLRSSITFRDNSSTVPVVRVLNGSTASATAVTMSDTSSPRTACTSTSSGPPAFRRRLACLRALQLDDLHRALNSITTTAVDGVPLAHRFPPILDGDFVADYPSKQLREGASPECAR

SEQ ID NO: 2924 - DNA, 1092 bp, Myceliophthora thermophilia
atgccttccgacgataagaccctcctccctctgcaggaggcgctgaacttggtcaaattggccgcagaaggcgactcccggcggtacatggggacgagggcagcgtacctgcccggggccgatctttcgccggacaagggcatgctgagcacgcataaggctgcttttggtggccatgtgtatggtcaagccgcattggccgttgcacgaacccagagggaactggaggacgagacggggcgcaaaccatccgagaggctgagcctgcataccatccacggctacttcacccgagccggcatccccagccggcccttcctctacaccgtcacgcccctcacctcctcgcgcaccttcagcaccctctccgtcacggcctaccagccctccgagcccagcaccaacccgcaaggcgaccacttccccctgtccgacgccgccctcccgctctcgccgccctccttcaccggcatgtgctccttcaagctccccgagcccgacagccagggcgtctcgacccaggaggcgcccccgcaggagcgcttcgcctccatcctctcctcccgcgcgcccgaggactggccgcccgtgccgcccctcgacatcaccgccttcgtcgagatcgtgggcgccgacgagcccggcaagttccccgtcgcaaccatgcgcaaggtcgacatgacggcgtacaacgccggccggcccgtgcacgagcgccgcgagctgatgctctacaagctgctcgccccgctgccgacgaccggcggtgacggtgacggcggaggcggcggcggcggcggcggcactggggccgaggagggggaggggaaggggcaggggcaggtatgggacgccaacgcgcacgtcattgcgcacgcgtacgtcgccgaccggaacgggctgctgctggcgggcaaccacctggccgtcatgcgggaggaggacggctggtgggtgcaggagatgttcttcccgcgcaccgccgccggccgcggcatcgtcgagagcaagatctggagccccgccggcgtccacgtcgcgaccgagtaccaggacggattggtgcaggggagggggctcggcaagctgtag

SEQ ID NO: 2925 - protein, 363 aa, Myceliophthora thermophilia
MPSDDKTLLPLQEALNLVKLAAEGDSRRYMGTRAAYLPGADLSPDKGMLSTHKAAFGGHVYGQAALAVARTQRELEDETGRKPSERLSLHTIHGYFTRAGIPSRPFLYTVTPLTSSRTFSTLSVTAYQPSEPSTNPQGDHFPLSDAALPLSPPSFTGMCSFKLPEPDSQGVSTQEAPPQERFASILSSRAPEDWPPVPPLDITAFVEIVGADEPGKFPVATMRKVDMTAYNAGRPVHERRELMLYKLLAPLPTTGGDGDGGGGGGGGGTGAEEGEGKGQGQVWDANAHVIAHAYVADRNGLLLAGNHLAVMREEDGWWVQEMFFPRTAAGRGIVESKIWSPAGVHVATEYQDGLVQGRGLGKL

SEQ ID NO: 2926 - DNA, 2226 bp, Myceliophthora thermophilia
atgagcccctcatcaaccccaccatccgccgagccatgcatcacgttcagctccggccgagatctgaacacgccaccagacctcaggatacttcatttcaacgatgtctaccatctcgacccgtcgtcggctgaaccggtcggcggcattggccgtttcgtgagcgtctgcaaggaataccgagaagccgagcgtttccagggacaaccggggctcgtgacgctgttctcgggcgatgtcttcaacccgagcctcgaaagctccattaccaagggtcaggcactcgatcccggcaagacaccatacaggcagccatatggttcctctcctgaatcttatcgggaccgactgtgcctgcgtcggggagccgcaatgctgacacccgttgaacagaatcacgatttggatttcggggttagacagttccgcaatctcacatccaagtgcaacttcccctggctgctggccaatgtgctcgacctggctttgggggacggggtgcccctcggcaacgccaaaaagacacacatgatcacgacctccaacggcatcaagatcggccttctcggtctcggcgagcgcgagtggctcgacaccatcaacgcgctgccgcccaacgtcatctaccgctccgccagcgacgtcgcccgcgagctcgtcccgcaactgcgtgccgaaggggccgacatcgtcatcgccctcacgcacatgcgcgagcccaacgataacaagctggcagagcagctaggcggcgagaacatcgacctcattctcggcggtcacgatcattactacgcccacagcttcatcaacgggacccacgttctgcggtctagatccgatttcaagcagctcagctacattgaagttcgccgggccgagcccccgggtagcgggcggaggtgggatgtggatatctggcgccgcgatatcgtgcggtccgtccccgagaacggcgagactctcgcgctggtgaacaagctcacggccaagctgaagaagagcctggagaagccggtcggctggactgccgccccgttggactcgaggttcaccacggtacgtctcggggagagcaacctgggcaactttgtgtgcgacatcatgcgccaccattacggtgcggactgcgcgctcatggcggccggcaccatcaggggagatcaagtgtatgcgccggggccaatccgagtcaaagacgtcaccgactgcttcccgtttgaggacccggtcgtcgtgatcaagacatccgggcaggccatcttggatgcgctcgagaacggcgtttcgctgtatcccgcgcttgaaggccggtttccccaggtgtcaaacatcaacttcaagttcgatccttcccgcccagtcggatcccgcgttctctctgtcgagataggaggggagtctctggacaaaggtcgcacctacgtcctggcgacgagaggttacatgggccgcggaaaggacggctaccgcagtttgctggtccggtccgagggcggcgagtgcgaggaggttgtgtccgaggagaacggcatgctcatctctgccatgctgcggcaatatttcatgtccttgaccgtgttggccaaatggagcggttggggcccgtcgttggaacgccactggtccaaagtcgcagataacgttgccaagagtcaccccattctcgggaaatcatcagcctctgctccagtcaacccagccgaggggagatcccaagtcagtcaatccggaagcgaaaacagaagcggctgggcagaatggacgcccagcaagctcaggcagaggcggtccagtcttccgccgatgcatggtgccgccgaggacgacagcgacagcgagtccggggaggagctggagcgagctagggagaatgctcgagccctggacagggagctcgccatcatgcgccgcgtcttcgccaagtggtgtcgccgggcaggagtccgcggaaatacgtgcgacgagctgacggaggaatggcgtgccggccagaatatgaagcaagttgttctagcacagccagcaaagacaaacacttctctgctttactctgcccttcgctctctttcctggcgcactcctcgcatctgtgaacaagcatacgctagtacttcggcatggtctcggtatagagtaaaagacaccctctgcgaggaatcaaagtttgcaggcttgctggtaaacatggcgaacagcggagctattactcattgcttcgggtaa

SEQ ID NO: 2927 - protein, 741 aa, Myceliophthora thermophilia
MSPSSTPPSAEPCITFSSGRDLNTPPDLRILHFNDVYHLDPSSAEPVGGIGRFVSVCKEYREAERFQGQPGLVTLFSGDVFNPSLESSITKGQALDPGKTPYRQPYGSSPESYRDRLCLRRGAAMLTPVEQNHDLDFGVRQFRNLTSKCNFPWLLANVLDLALGDGVPLGNAKKTHMITTSNGIKIGLLGLGEREWLDTINALPPNVIYRSASDVARELVPQLRAEGADIVIALTHMREPNDNKLAEQLGGENIDLILGGHDHYYAHSFINGTHVLRSRSDFKQLSYIEVRRAEPPGSGRRWDVDIWRRDIVRSVPENGETLALVNKLTAKLKKSLEKPVGWTAAPLDSRFTTVRLGESNLGNFVCDIMRHHYGADCALMAAGTIRGDQVYAPGPIRVKDVTDCFPFEDPVVVIKTSGQAILDALENGVSLYPALEGRFPQVSNINFKFDPSRPVGSRVLSVEIGGESLDKGRTYVLATRGYMGRGKDGYRSLLVRSEGGECEEVVSEENGMLISAMLRQYFMSLTVLAKWSGWGPSLERHWSKVADNVAKSHPILGKSSASAPVNPAEGRSQVSQSGSENRSGWAEWTPSKLRQRRSSLPPMHGAAEDDSDSESGEELERARENARALDRELAIMRRVFAKWCRRAGVRGNTCDELTEEWRAGQNMKQVVLAQPAKTNTSLLYSALRSLSWRTPRICEQAYASTSAWSRYRVKDTLCEESKFAGLLVNMANSGAITHCFG

SEQ ID NO: 2928 - DNA, 267 bp, Myceliophthora thermophilia
atggggaacatgcggcgaaagaaggagagcccctccccacctcaaacgcaggttttgcacgaccttgagtacactagccagcaagtgctgccggacttcctggaacgaaaggactggtttacttcccgggcgacgtacattacacggcactctccggagcgcatcgtgtacccagctggcgcaccgcccggagaatggaccgataacaattcggccaagagatacaccatgctgacatgctccgccataggctctctccttctgtga

SEQ ID NO: 2929 - protein, 88 aa, Myceliophthora thermophilia
MGNMRRKKESPSPPQTQVLHDLEYTSQQVLPDFLERKDWFTSRATYITRHSPERIVYPAGAPPGEWTDNNSAKRYTMLTCSAIGSLLL

SEQ ID NO: 2930 - DNA, 474 bp, Myceliophthora thermophilia
atgagagccgcccagcatcgtcaatctcgcggatttttggacctccgggagtcttctgccattgagacgatcacccatggtccagtaagcggagctcgtgacgctctgttttcgctcggcttcctcgcacgccctggccgcgagctgatgctgaggacacagcaaagacaaaaaaacgccgtcctgagctgttatgggctaagcgcggacttcgcagcccgtctggagaccgagtcgaccggcgttatggctagcccgcatgatgcatactgggccgctgaacacctgcccgaagcgtccggttcatccaggtcactcgacggctcaccgcccggtaactatcacgaggcgagcaaggggaagttgcctgccccacctcccggagccgtcccgatcccccctgcacaccacgagaaagtcgtcgaggatttgcacttcgcagtcgagatacgatatgtcgactacgagatatga

SEQ ID NO: 2931 - protein, 157 aa, Myceliophthora thermophilia
MRAAQHRQSRGFLDLRESSAIETITHGPVSGARDALFSLGFLARPGRELMLRTQQRQKNAVLSCYGLSADFAARLETESTGVMASPHDAYWAAEHLPEASGSSRSLDGSPPGNYHEASKGKLPAPPPGAVPIPPAHHEKVVEDLHFAVEIRYVDYEI

SEQ ID NO: 2932 - DNA, 1140 bp, Myceliophthora thermophilia
atgtccttcaccgctaagcttcgcgcaagcaaccggcagtctaccacctcggactcacgagaacgaagctcctgcgccagcggccgcactcggtccacaagccctgtcaagaatcctgatgaccttcttaaactcgaaaaacccgtgacctggatgactccggacccgcgcacgctacgggacatggtaaaggcgacagggagtgcccaggcgctacaactctttgacaatatttggagggttatacaaggagaaggatacttgccgcgggagttgaaggggattttgaaggaggagctgatggttgacgactcacgctttgcaccagctgatagggctatggtgatgagtcagaaagagagggacgatgcttgtcggctcttcccgtcactcggcgccgacgaaggccggatgctcggccttctcactctctacggcgagctcaacaccatccgcgacatcgttgctactactatacggttcataaacacgccccgctccgaagcggcgtggaatgaccacattcacggcccagtcttgcgccttgctgtgtccagtaccccgcacgttggcgcagagaacatcacgcaagccgccattgccaaagccttcgtcccggccgcacgaggggagctcgagactctgggcggcaaaatgatcgactacgcactgcttcttcggcccgagaaacacctcgccgtccgcatcgctaacttcgtggacggcttcgaggagccacggaccttcaaccaatcgacgcacggggtgctgtgttacgagccgacgggcgtgctgatcgagactaaggttgacatccgacggcgtgccgaagggaaggcccagctaggaatatggctagcggcgtggtacggccgcgtggccaggttcgcgccagtgccctccgctgatgcggacacaccaacgaacttaccattcctcccggtcctgctcgtcgtatgcgagaactgggagctgtactttgcgttcgacagggacggcgaatttgaggtatgcgggccccttgagattgggagcactgtgaccgtcgacggctcgtaccgcctgcttgaggtgctacggctactcgcgggttgggtcgccggtgagttccgtgggtgggttgaggggtgtgttgcatag

SEQ ID NO: 2933 - protein, 379 aa, Myceliophthora thermophilia
MSFTAKLRASNRQSTTSDSRERSSCASGRTRSTSPVKNPDDLLKLEKPVTWMTPDPRTLRDMVKATGSAQALQLFDNIWRVIQGEGYLPRELKGILKEELMVDDSRFAPADRAMVMSQKERDDACRLFPSLGADEGRMLGLLTLYGELNTIRDIVATTIRFINTPRSEAAWNDHIHGPVLRLAVSSTPHVGAENITQAAIAKAFVPAARGELETLGGKMIDYALLLRPEKHLAVRIANFVDGFEEPRTFNQSTHGVLCYEPTGVLIETKVDIRRRAEGKAQLGIWLAAWYGRVARFAPVPSADADTPTNLPFLPVLLVVCENWELYFAFDRDGEFEVCGPLEIGSTVTVDGSYRLLEVLRLLAGWVAGEFRGWVEGCVA

SEQ ID NO: 2934 - DNA, 633 bp, Myceliophthora thermophilia
atggagagtgtatggtgcctaccggaggagggagatacggagcctcgggggcctgacgagcaaggtcgacacagcactttgctgcaaattgtgcttggcatgtggaggaagcctgaggcagggtggggcctgctccagtcggtgggcagccacttactgatgtcgtgctttctcgcattcccgtcaaattcccaggattcccaggaatccattccagcagtggaaagtgtgttctttaacagaagcaagtggatttggccgattttccatcggtcacccacccaccaacggggtgccacaaaaatccgtgacctggcagcaggaccactcgctacactaagtcacaagatcttcccaggtttcccgtgcgctgcggccgcacatcagcctaaggtaaggcaagcgtgtcccgactcggcccgggtaggcagcaaaaagttccagactcggactgcagtggttccgagttgcaccagcacctatcgctggggatccagaatagtactcagctggctgcgagattccggcttagtcacggggccgagcgcacactttgtggcgcactcccgtctttcgaacccactggccctgcctggtccctccacagcagagaaccggttccagaccgggtga

SEQ ID NO: 2935 - protein, 210 aa, Myceliophthora thermophilia
MESVWCLPEEGDTEPRGPDEQGRHSTLLQIVLGMWRKPEAGWGLLQSVGSHLLMSCFLAFPSNSQDSQESIPAVESVFFNRSKWIWPIFHRSPTHQRGATKIRDLAAGPLATLSHKIFPGFPCAAAAHQPKVRQACPDSARVGSKKFQTRTAVVPSCTSTYRWGSRIVLSWLRDSGLVTGPSAHFVAHSRLSNPLALPGPSTAENRFQTG

SEQ ID NO: 2936 - DNA, 825 bp, Myceliophthora thermophilia
atgtaccgatcgcccctgatgagcaaagaggaagaggacgggcttcgcgtctttccaggcgaccctgcgacggtctcgcggccagaccaacagcagtctccatgtctggccggaatggcctgtctcgtcgaagagagatttccgaacaaaggccggagacgatccccggccgacgagccgttctggacccgcgcgagacgtccgacgcacgcaacaagaccgggcgctctgttctcatcctgggcgcatcaggcaccggccgctccaccgggcgcggcacccggcgacggatgcaacgctgccccctactcgacttggcggaccgaaacgggggaaacggaggctttggctttgccgctttggtggcagccgggagacggaagagttcccgccgatggctccgcaatccccggctcgaggacgacgtggccaccgggagactactattactctgccgtatctcagggggacgcgttgctgctgagcaccatggaccataacaggcggacggcggacgagtggatgggcctcctccttggaaacggggcgtccgccgagggcgggatggaggctgcggcggatcatcgcggtgtcgccggctcgtcgccggccccggaggacgggagagaggacgacgttatggacacggacgagccatcatgggatctccccgactccctcgacgggacgaacggaatgatggatccccgcgcgctggatacaagccggcacgccgatctggtcttcgggatccaagctacgacggctgcctactttctcgcctactttctcgccaccgttcggtcacggcgcgagtcaacctaa

SEQ ID NO: 2937 - protein, 274 aa, Myceliophthora thermophilia
MYRSPLMSKEEEDGLRVFPGDPATVSRPDQQQSPCLAGMACLVEERFPNKGRRRSPADEPFWTRARRPTHATRPGALFSSWAHQAPAAPPGAAPGDGCNAAPYSTWRTETGETEALALPLWWQPGDGRVPADGSAIPGSRTTWPPGDYYYSAVSQGDALLLSTMDHNRRTADEWMGLLLGNGASAEGGMEAAADHRGVAGSSPAPEDGREDDVMDTDEPSWDLPDSLDGTNGMMDPRALDTSRHADLVFGIQATTAAYFLAYFLATVRSRREST

SEQ ID NO: 2938 - DNA, 6756 bp, Myceliophthora thermophilia
atgtcggccagttatacgcgagatatccttgtcttttccggacagggctcaaagcaacaccttgtcgactcgggagctcccgacagcctgatcgcgctgctcggagagaagcagaaggtcgcctattctacgtttctacgcagagcccaagatgcgctactccgggaatattccagcatcaaggccgactcgggctcccttggccacgggaaccaggtcgaagaggaggtgtttgagaagagcgagcatctcctggttcccccgtcgatgctccagtcccacccagtcttcgagaccatctccctatacacgcgccatatcctcgagttgatgctgtaccaatcacaacaacaacaacaacggggaacgcatgttgtccgcgagaccaccggcatctgtaccggcgctctggctgccatcctggccgccgccttctcctcatacgactcggatgatttcgtccgggcggcggtcgagggcgttcgcctggcattttggataggtgtacgggcagcttccctctccgtcgagcgggagcggctagaggaatcatcagggtcgagttcctgcgtcctgggcgtattcggggtgacggagaagagaatgggagaactgttgaagggctactacgcagaggaaagcgaggaccgccatggtaacgtccgaatctcggccgtattcagcgacgtggcgctgtccctcagcggcgacgcagccgacttgcaacgcgtcaagacgtacctcgaaggccgctcgatcgagtgccgctgggcgcacattcacgctctctaccacgggggctctaagtccaagcgagcggtggacgcaaccctcagcgacgctgccaggaggaacatcgcgttccccggccggaagtccctccatgcctccgtcatctcggcggcggacggcgcacacatgggctccggctccgactccgccgccgcagatccgggcggcccggaggagaccaaaaccaacatcctgctcgaggaggcccttcgcaacatcttcatcgacacggtggactggaaggggacgagcgccggcctcagagcctccatcctggaccgcctcgagggagactcgtcggccgcgtaccgcatcatcggcgtcggaccgggctcgcgctccttgttggacccattccggggagactcggcacatccgggcctcggcgtgatcgacaacctggccgagtcgctggcgcagccggcacaggacgacattgccatagtcggattgtcggttaactttccgggggccaagggacaggagcagttctggcagctcctggcgagcggcttgagtactgtcgccgagatcccaccatcgcgattcggggtacacgtgcaagactcggacgaggcccacggtcgatcccggggaaacgggcacgcgaactgcctagacaactcattcgacttcgacccggcctacttcaacgtctcgcccagggaggccaagtcgatggacccccagcagcggctggtgctcatggcggccctggaagcgctcgaggacgccgggtacgctccggactcgacgccgaccttccagagggagcggatcggggtgtacatgggcgtggcgacgggcgactacgtcgacaacctgagggacgacatggacgtctactacagccccggcactctgcgggccttcatcgccggccgggtgtcgtacgccttcaagttcggcggcccctcgatggtgaccgacacggcctgctcgtcctcgctcgtgtccatctaccacgcgtgcagggcgctgcgggcgggcgagtgcggcaccgccctggccggcggcgtcaacaccatgtcgagcccggacatgtacaacggcctcgcgcgggcgcacttcctgagcccgacgggccagtgcaagccgttcgacgcggccgccgacggctactgccgcgccgagggctgcggcctcgtggtgctcaagcggctcgccgacgccgtggccgagggcgaccacatctacgccgtcatccgcgccatcggcgtcaaccagtgcggcaaggccaggtccatcacccacccgcacgccaacacgcaggcctccctcatgaggaccgtcctggcctcggcccgcgccagcccccggagcatcggcgtcgtcgaggcccacggcacgggcacccaggccggcgacgccgccgagatggccagcatccggtccgtcttctgcccccggcctcccgaccagcccctgcggcagatcccgccccagacctcctttcgtcacctgaacccgaagctgccggccaaccggcccggcgaggtcaccatcccgacgcgcatgaccgagtggaagaagccgcctggccagccgacgacgccccggcgcgccctcgtcaacaactttggcgcgtccgggtccaacgccgccctggtactcgaggagtacgtggtgccaccaccccggggtcggcctcactcgaccaacaacaacaacaacaacaacaacaagcgaagccaccacctcctcaacatctcggccaagacggccaaggcgctcgaggccgcccggcgggacctgctggcgttcctgagccagaacccggacgtgggcctccaagacctctgctacacggcgaacgcccggaggcaggagtacccgacccaccggtggtcggccgtcgtctcggaccggggcgacctggcggagcagctggggggcggccaccaccacccggccaagggagcgacgacgacgacggcgacggcggcggcaggtgggggcttgggcttgggcttgccggccaagacggtgttcgtcttctcgggccagggcggcgtccacgcgggcatgggcgccgcgctcctcgcgaccgtcccgctcttccggagcatcgcggaccggtgcgacgagaccctcgtcgcccgcggattcccccccgtgtcgcccttcctggccggctccgccgaggcctcctcctcctcctcctcctcctcctcctcctcctcctcctggtcggccgaggaccagatcatcatctcgcagtgcgcctgcttcgtcttggagtacgccctggcggagacctggaggcactggggcgtcactccggacctggtgattgggcatagcatcggtgaatacgccgcgtttgcgttcgccggcatgatcggctgggaagacgcgctcctcctgctggccgggagggcgcgcctcctggcgacccggtgcccgccccaggtcaccggcatggtggcgtgcaggctgtcgcgggcggccgtggagcagctgctggccgacaaggcggacgagctggcgggcatcaccgtctcgtgcttcaacagcccgtccgactcggtcctggccggccccgtggactcgctggcgaggcttgcccggcactgcaaggacaacgggatccggcacaagcgcctcgacgtcccctacggtttccactcgcccgccttggaacccatcttgagcgaccacggccgggccgcccgcgccgtccccttccgcccgccctccctgcgcgccgggtccagcttgcgtggcaggctgttcgggcagtccgagacggtcgacggcgactactttgtccagcatgctcgcgagcccgtcaacttctccggtgtggtcgaggacgccctgccggagctggctggctcccatcccacttttatcgagattggtccttctccttcgagtaattacgcccctatcccctatcctccccccgagtccatgttgaagcaaatcatcaacacatccctgtcctacaccttcttggggtcgctgactccgacccgcgccgcctgggactctctgagctcggctttgcgagagctctacctgcgcagatacgacatcaagtggcggcgagtctacgacggctcgcaggcaaagttcgtcaggggtttcccggggcacccgctcaacttggcgacgtactacgtcccctacaaaccaccgtcccgccaggacaagcttcttccggggtttttttcggggccgcagcagcccccgccgaggcccaagtacgccttcctgaccgacgtctcgccggctgtcgaggacggcagcgcgacaaggtacgcgtcgacggccatggagccgatcaagaagttcgtcgacgcccaccaggtcggcgacgtgcccttgtgcccggcctcggtgtacgtcgaggtggtggcgcaggcgctggcctaccacgcttccctcgacatcgcgtccaacgtgttcatgttcgagaacgtcaagttcgaacaccccttggtctgcggagacgacgccgccggcggctcgtcgcgccaagtgataaagacggcgctcaacatgcagcccgtcgagggccagagctacgtgtgctcgtccgggtcgggggacacgctctgcgcgggaggcgtccgcagtctcgaggtcggctcgcaggccgtcgtcgacatcctggcccggaggcgcgggcgggtagatcggctcaggaggtccgtcgacggcgcgccccggagcctggccgagtccttctcggaccggaccatctaccacgtcatcttcccgcgcgtggtccggtacgacaagccgctcatgacgctgcgccagctgacgaccgtcgcggccggctccgagggccacgggtacttcacgctgccgctgccccccaaccccggccggtacgtgagctcgccggccctggtagacacgctgctgcacgcccccggtttcatggccaacacgctcgtggacgccgacacggcctgcatctgcgtggcgctggagcaggccctggtgcccagcgacagcccctcgctgcaccggcaggagctgcaggtctactgctcgctggtcgacattgagcactctcttatcgccgacgcctacgtgctcgacgccgagggcagcatcgtcggatacgtcaagggcatgtgcttcaagaagctgaagctcaagcccttcaaggcccacctctcgcgtcagctcgcccgccgccgcccggctgccgctgctcctgctcctgctccagctcctgtccctgccgggccgagtagtggcagcgtggggggcgggggcaggggcagacccgtggcgggagactacaccacggcgacgaccaagacgacggcgacggcgacggagatatcgagcaccgtgtgctccatcgtccgcggcctgtgcggcgtggactacgagccgaccgaggcgaccacgctggccgagctcggcctagacagcctcctgtccgtcgagctctcccacacgctggccaagacgctacggtgcaccgtctctccggaccagctccaggaatgctccgacctggcccaggtcgtccagttggtcgccaagaacagccccctccagcaccagctccagctccagcaacacgagcagcagcagcagcagcagccgaccgcgccccccacgactgccgcgccctcggtcctccagttcacgcccgcgacttcgtccctcgatagcagcgcctcctcgtcgtttcagccggaccagccggcgaccccgaacaccgagtacaacaacatcgccaccagcagcaccaccagcagcaccaccaccaccaacagcaacaacatcaacagcaataacaacaagccgacgacaggcaacgccgggtccgccgccgccgccacctccctgcccgagttccagtccctcttcctggccgtgtgcggagtgctgcccgaggacgaggacgacgagcggagcgtgccgctgtcggcgctcggggtggactcgctgctgtcgatcgagctctgccaggcgctgcgggacaagctcggcgtcaccgtcgaggaccacgacgccgtcggcgacctgacctaccgccagctgcacgacatgtgcgcctgcgccgccgcgaccaagctctctcccggccccgcctcgccgtctcccgaggctgccgcaccatcacctcctcctactccccaaacggcgccgggcatccggcagctccagaaacgcggcgacgggagcggtagaagtggtagcggtagcgggagcggcggccccctgtacctcttccacgacggcagcggcacctgcggcatgtacgcccgcgtcggccccctcggccgcgacgtctacggcgtccccagcctgcgctccgacgcccagacgctcgaggccctcgcggccgattacatccgccaggccaacctcggtgcaccccagggagggcctctgatcctagctggctggtccttcggaggcgtcctggccttcgagatcgcgaggcagctggggggagccgtcgtaaagggcgtcgtgctgatcgactcgcccgcccccgtcgaccaccagcccctccccgccgaggtgatccatcaggtcgtgtccggccggaggtcggcgtcggcgtcggcgctggcctcggcgtcggcgcgggagatgcaggaggcggtcgaggccaacttcaagcggttcgccgccatgctgggggactacagccgccgccaccaccaccaccaccaccaccgccaatcgccatcggcaggccggtcgtcgtcgtcgtcgtcgtcgtcgtccccgccgccgtgcgtcatggtgcggtgcgtcaagaccatggaccgctccgccctgggcggcgcccactacccctggctcggcgacccggccgaggcggaccggtccatccgcacctgggagcgcctcctgggccgccagctgcccgtcttggaactgcactgcgaccactttagtccgtttgagcccgagaacgttggggagctcacgcagcacttgagaacggcttgtgagatgttggaggactattag

SEQ ID NO: 2939 - protein, 2251 aa, Myceliophthora thermophilia
MSASYTRDILVFSGQGSKQHLVDSGAPDSLIALLGEKQKVAYSTFLRRAQDALLREYSSIKADSGSLGHGNQVEEEVFEKSEHLLVPPSMLQSHPVFETISLYTRHILELMLYQSQQQQQRGTHVVRETTGICTGALAAILAAAFSSYDSDDFVRAAVEGVRLAFWIGVRAASLSVERERLEESSGSSSCVLGVFGVTEKRMGELLKGYYAEESEDRHGNVRISAVFSDVALSLSGDAADLQRVKTYLEGRSIECRWAHIHALYHGGSKSKRAVDATLSDAARRNIAFPGRKSLHASVISAADGAHMGSGSDSAAADPGGPEETKTNILLEEALRNIFIDTVDWKGTSAGLRASILDRLEGDSSAAYRIIGVGPGSRSLLDPFRGDSAHPGLGVIDNLAESLAQPAQDDIAIVGLSVNFPGAKGQEQFWQLLASGLSTVAEIPPSRFGVHVQDSDEAHGRSRGNGHANCLDNSFDFDPAYFNVSPREAKSMDPQQRLVLMAALEALEDAGYAPDSTPTFQRERIGVYMGVATGDYVDNLRDDMDVYYSPGTLRAFIAGRVSYAFKFGGPSMVTDTACSSSLVSIYHACRALRAGECGTALAGGVNTMSSPDMYNGLARAHFLSPTGQCKPFDAAADGYCRAEGCGLVVLKRLADAVAEGDHIYAVIRAIGVNQCGKARSITHPHANTQASLMRTVLASARASPRSIGVVEAHGTGTQAGDAAEMASIRSVFCPRPPDQPLRQIPPQTSFRHLNPKLPANRPGEVTIPTRMTEWKKPPGQPTTPRRALVNNFGASGSNAALVLEEYVVPPPRGRPHSTNNNNNNNNKRSHHLLNISAKTAKALEAARRDLLAFLSQNPDVGLQDLCYTANARRQEYPTHRWSAVVSDRGDLAEQLGGGHHHPAKGATTTTATAAAGGGLGLGLPAKTVFVFSGQGGVHAGMGAALLATVPLFRSIADRCDETLVARGFPPVSPFLAGSAEASSSSSSSSSSSSSWSAEDQIIISQCACFVLEYALAETWRHWGVTPDLVIGHSIGEYAAFAFAGMIGWEDALLLLAGRARLLATRCPPQVTGMVACRLSRAAVEQLLADKADELAGITVSCFNSPSDSVLAGPVDSLARLARHCKDNGIRHKRLDVPYGFHSPALEPILSDHGRAARAVPFRPPSLRAGSSLRGRLFGQSETVDGDYFVQHAREPVNFSGVVEDALPELAGSHPTFIEIGPSPSSNYAPIPYPPPESMLKQIINTSLSYTFLGSLTPTRAAWDSLSSALRELYLRRYDIKWRRVYDGSQAKFVRGFPGHPLNLATYYVPYKPPSRQDKLLPGFFSGPQQPPPRPKYAFLTDVSPAVEDGSATRYASTAMEPIKKFVDAHQVGDVPLCPASVYVEVVAQALAYHASLDIASNVFMFENVKFEHPLVCGDDAAGGSSRQVIKTALNMQPVEGQSYVCSSGSGDTLCAGGVRSLEVGSQAVVDILARRRGRVDRLRRSVDGAPRSLAESFSDRTIYHVIFPRVVRYDKPLMTLRQLTTVAAGSEGHGYFTLPLPPNPGRYVSSPALVDTLLHAPGFMANTLVDADTACICVALEQALVPSDSPSLHRQELQVYCSLVDIEHSLIADAYVLDAEGSIVGYVKGMCFKKLKLKPFKAHLSRQLARRRPAAAAPAPAPAPVPAGPSSGSVGGGGRGRPVAGDYTTATTKTTATATEISSTVCSIVRGLCGVDYEPTEATTLAELGLDSLLSVELSHTLAKTLRCTVSPDQLQECSDLAQVVQLVAKNSPLQHQLQLQQHEQQQQQQPTAPPTTAAPSVLQFTPATSSLDSSASSSFQPDQPATPNTEYNNIATSSTTSSTTTTNSNNINSNNNKPTTGNAGSAAAATSLPEFQSLFLAVCGVLPEDEDDERSVPLSALGVDSLLSIELCQALRDKLGVTVEDHDAVGDLTYRQLHDMCACAAATKLSPGPASPSPEAAAPSPPPTPQTAPGIRQLQKRGDGSGRSGSGSGSGGPLYLFHDGSGTCGMYARVGPLGRDVYGVPSLRSDAQTLEALAADYIRQANLGAPQGGPLILAGWSFGGVLAFEIARQLGGAVVKGVVLIDSPAPVDHQPLPAEVIHQVVSGRRSASASALASASAREMQEAVEANFKRFAAMLGDYSRRHHHHHHHRQSPSAGRSSSSSSSSSPPPCVMVRCVKTMDRSALGGAHYPWLGDPAEADRSIRTWERLLGRQLPVLELHCDHFSPFEPENVGELTQHLRTACEMLEDY

SEQ ID NO: 2940 - DNA, 375 bp, Myceliophthora thermophilia
atggctactaacgaactcgagaaccgcgaaaagtactcgcagaagttggttaacgaggcttacgccaaaattgaggcactcgagggcgctaaagcgaagcgtatcaagatcgaactacctagtaaatacggaggaaccaaggaggatctcgtaggattcttaataaacctccgatcctacttccggcttaatgacgacaagtttccggacgataaagccaaagtcctctatgtagccacgagactagagggcaaggtacttagatggttcgagcttacgtggaatgactatctcatagaggaagacgaagacgatcgagatgcgtttatacgggcagtcttccgatcttataactgtttcgaagaagagctttag

SEQ ID NO: 2941 - protein, 124 aa, Myceliophthora thermophilia
MATNELENREKYSQKLVNEAYAKIEALEGAKAKRIKIELPSKYGGTKEDLVGFLINLRSYFRLNDDKFPDDKAKVLYVATRLEGKVLRWFELTWNDYLIEEDEDDRDAFIRAVFRSYNCFEEEL

SEQ ID NO: 2942 - DNA, 609 bp, Myceliophthora thermophilia
atggcaccggagcaccattcgcagcttggtgcacaataccataccatgaacatcagatgccactcaacaccctgctccgacatctaccccgagaaccacctcatttcccctatctacgtggtcgactcccaagaaccatccaactaccctccgcttaggagcaaccaagcccagcctgagcaacatccccccaagacactgccgtactacgcaagatcccggggtattaaccagccacccgaacgcttggtgaagaagcaagagtcggccatgtgctactaccagcgcatctggtggggctgcggttgctacttcggcgtgatcctgctccgccgctgcgagcaccgcaacacgccgcgctgccagcgccgccacctgctggaccgctggcacctggccacctactgcccgcaccaccgcgacccgccgctccaactcacctgtagcccggacaacagtgacgacggaaacagacgacgccgtcgccaccgccgccgccgccgcagccatcgcagccaagaccagcgcccgggcagtcgtggcgccaccgccagtgcagcagagaccggcgattctggcgaaggaaacagcagcagtggcagcgagtga

SEQ ID NO: 2943 - protein, 202 aa, Myceliophthora thermophilia
MAPEHHSQLGAQYHTMNIRCHSTPCSDIYPENHLISPIYVVDSQEPSNYPPLRSNQAQPEQHPPKTLPYYARSRGINQPPERLVKKQESAMCYYQRIWWGCGCYFGVILLRRCEHRNTPRCQRRHLLDRWHLATYCPHHRDPPLQLTCSPDNSDDGNRRRRRHRRRRRSHRSQDQRPGSRGATASAAETGDSGEGNSSSGSE

SEQ ID NO: 2944 - DNA, 7185 bp, Myceliophthora thermophilia
atggcaggactgtctcagcttatcgtctttggcgaccaagcggtcccttacgcggccgagttacggcgattcatcgccaagcgcgaagactttacgctggccaagctcctctccgaagcctaccacgcactcagggccgaaatcgcccggcttccctacagccagaggactcagttcccgtcttcctctaccctgacggagctcctcaacgcccattgctcctcctccacgacgcccagttgtgctctggacagcgccctggcctgtttgcaccagattgcagcctttgtctcatacttcaacgacacgggcaagaagtacccaaagtcgccatcatcatgcctggtcggaacctgcatcggccttctttccgcattcgcgatcagctgtagcgagagcattctcgacctagtcgacctcgctcccgatctcatccttctcgcctttcggctgggactggtggtccagaacaggaccgcctcggtggtggcgtccggcctcgccgcgggcagcagcagcaccaccgcttcggattccacttcggtgtcctacgccgtttccggcatcgatggggccactgccgccagcctcgtcgaccagttttgccggtctcggtccctcgccccggcggcccgcgtctatgtgagcgccgtcggtaacgggaacgtgaccgtgtcgggccctccggcacagttgcgcgccttcctctcccagcacccggatctcaagtcggccaggatggccatgagcggcctgtttcactcggccgtcctctacgaaccatcacacatcgccgccgtgctggagaccctgagcccgaggcttcgccgcagcgtcggcaggctggacatcgtgcccaactcggaaggggatccgctgataatagcatcggggatggcggcggagcaaaccttgcacgccatcctctccgacatcctgttgcgaccgatgcggtgggatctcgtcacccagcgggcagccgagctgttcgagaaatcatcatcggagccttcgccggagctggacgtgcttcccttcgccgcaggaagcgttcaggggcttgccacggccattcgggagtctcgccgcggtggcgaggcgacggtgacagtcgccgacacggccggacggcctcgaatcccctccgcagtagcagcagccgcagcaccagggaccgggagccagagggacagggccaagatcgccatcatcggatactcgggtcgcttcccggaggcggacagcaacgaggagttttggaacctgctcctggccgggctcgacgttgtcaaggagatccccaaggaccggttcgacccccatctctactgcgatccgacgggcaagaagcggaacaccagcggggtcacgatgggatgcttcgtcaagcacccggatctgtttgacgcccgcttcttcggcatgtcgccgagagaggccgagcaggcggacccggcccagcggctcgccctcatgacggcgtacgaggccatggagatggccggcttcgtcccggactcgtcgccgtcgacgcagcggaaccggatcggggtcttctacggcaccgccagcgatgactaccgcgaggtcaacgccggccagaacgtcgatacctactttgtccccggggggagccgcgcctttctccccgcgcgcatcaactaccacttccggttcagcggcccctcgttcgacgtcgacacggcctgctcctcgggcctggccgcggtgcacatcgcgtgcaactccctctggaggggcgactgcgacgtggccatcgccggggggaccaacatcctgaccaaccccgataactgggccggcctggaccgcgcccacttcctgacccgtacgggcaactgcaagacgttcgacgacggcgcggacggctactgtagggccgagagcgtggccacggtgctcctcaagaggctcgacgacgcgctcctagacggcgaccccatccaggccgtcatcctcggcgccctcaccaaccactcggccgaggccgtctccatcacccggccgcactcgggagcacagcgggccatcttcagccgcatcctcgagtcggccgacgtcgacagctccgacgtcagctacgtcgagatgcatgggaccggcacccagcacggcgacgcctgcgagatggactcggtcctttccgtcttcgcgcccgactactcctcccgccggcaccagcccctatatctcggctcggccaaggccaacgtcggccatgccgagtcggcctcgggcgtcacctccctgatcaaggtcctgctcatgatggagaaggggcagatcccgcgccacgtcggcatcaagaccaggatcaacaggaacttccccaccgatctcgaccggaggaacgttcgcatcgccatgcagacgacgccgtggccgagaccggaggaggaggccggagacgccgccgcttcttcgaccgggaggcccaggcgggcttttgtgaacaacttcggagccgccggcggcaactcctcggtcctcctcgaagacgcccccccgcggcggccggtgtcgggtcgggaggacccgaggcccctgcacgtcgtcgccgtgtcggccaagtcgcagtcggccctgaggcgcaacatccgcgccctcgcggaccatctcggcgccaatcccggcacccctatcggctcgctcgcctacacgacgacggcccgccgggtgcactacaacttccgcgcggccgtgaccggcaggacgatcgacgagatccgcaggggtctcctgctggccgagacgaaggagcactacgccacccagaacggcgaggtccccgtcgccttctgcttcaccggccagggggcacaatacctcgggatgggccggagactgctcgagattcctcagttccgctctctcgtcgcgaacctcgacgagatcgcgaggctgcagggcttcgatcccgtcctccccgtcatcgacggcagctgcagcaacagcagcagcagcagcaccactaccacccctctcgagacgcttcttcttcctccgaccaccgtgcagctcgccatgacctgcctgcagatggcgctgggcaagttttggatctccctcggcctcacccccaagctcgtcgtcgggcacagcctcggcgagtacgcggccatgaacatcgccggcgtcatgtccgatgccgacaccatccacctcgtcggcacccgcgccgccctcctcgagaagcactgccgcgtcggaacccacacgatgctggccgtcagggcttccgcgtccgaggtggcctctctcatcgcggcgcgcgcaaacaaccgcaaccgccacctcgagatctgctgcgtaaacggccccgaggagaccgtggtcggaggacccaatgacgagatcgagtccttcgcctcgtatctgcgcggcatgtccatcaaggcaacgcagctcaaggtgcagtttgccttccactccgcccaggtcgagccgatgctggagccgttccgccggagctgcgacggcgtcaggttccgggatccctccgtgccgctgctctcgccgctcctgggcagggtcgtcaccgccgcctcggacttgggcatgccgtcgagctacctgagccgccactgccgcgagacggtcaacttttacgactccctgcgggccgcaaagtcgacgggggccatctcggacaagacggtttggctcgagatcgggcctcacccgacgtgctccaacagcctcaaggcctcgctcgcgtcgtcgtcctcttccactactactactactactaccagaatcttcccgaccttgcgccgcggcgaggacgactggtccgttctcgttcccaccctggcttctctatacgagtcgggcgtcgcgctcagctgggacgattaccaccgcggcttcaaggacaacctgaccgttctgaggctcccttcgtaccgctgggatctcaagagctactggatcccttacgtccacgactggtgcctgaccaagggcctgccccccccggtccagtgcaaccaccacgagctgacccccaaggcgttgcctgccaagcccaaggaacctttcaccatctccgtccaggatctggtggaggagaagtacggcagcgacgagtcgcggatcgtggccagatcggacgcacaacacccggagttcgcggccatcctccgggcgcacagggtcaatggccagcccgtctgttcctcggccgtcttcgccgatatggcgctcaccttgttcgctcggctgcttgagaagtcgccggtcgccttcgacaagaccgacctgggcgtcgaggtccgcaacatggttgccgacaagtccctcatcctcaacaacgagccgtcgcagctggtcgagatgaaggcccaggtccggtggtcgaccaggcaggccaccttctccctgtccagcatcgacccgcgcagcggaaagcagactgcccaccacgccaagtgcaccggcacctactcgccgatcagcggctggaagacggaatggggccggcggcagtacctggttcaggggagggtggatcacctgcggcaggcggtcgacgaggacgactcgggcgtgtcccggatcaagacgggcatgttctacaagctcttcagctcgctcgtcgattacgagcccccgttcaggggctgccgagagctcatcatgcggtcggccgacttcgagtccacggccaaggtcaagttcgacaacacgcccgcgggcacggccgacaggttcaagtacccgccctactggctcgacagcctcggccagatcaccggcttcaccatgaacgccaacgacaccctcgactcgaacgagcaggtcttcatcaaccacgggtgggagaacatgaggctctcggagccgctctccgacgctcttacctaccagacctacgtcaagatgcaggagaacggcgaccaccgctcttacgtcggcgacgtctacgtcttcaacccgctgtcgaaccgcatcatcgccgtgtacgagggtgtcaccttctcggccgttccgaggaagattctcgacaaggtcctgccccgcccggccgccggtgcccctgctaccacgactaccaccaccagcaccaccaccaccactactactactgctgctgctgctgctgctaccggcagtaagccagtccttatgccgtctccgccgatcgcaaagcagcagccggccgctacctctgtggccgccgcggataaactccgcgctatcatctcggaggaagtcggcgctcccatcgcggaggtcgtcgacagtgttgaccttgccgacctaggggtcgactccctcctggccctgaccctgtcagaccgcatcctcgaagaactaggcaccaaggtcgactcggcctcgttcatctcgggcctcaggttccaggatctcgtaaagctcgttacaggaggagaccaagtttcagtctccgacgcaccctcctcccctgcggccccattcatcgagcaagggtcggcagtcccgtcgccgcaggccgttgccgccaaggaatcctcacgcgggggccgggcggaggcggaggcggcagcagacaagctccgggccatcattgccgaggaagtcggcgctccgatcgccgacgtggtcgacgacgtcgagctcgccgacctgggggtcgactctctcctggccctgaccatggcggaccgcatcctcgaggagctcgacaccaaggtcgactcctccctgttcatctcgggtctcaagttcggcgatctcgtccgcatcgtgacaggaggagccaccgccggcggcggcgccggcgccgggatctcggaatcttcctcctccacctcgtcggtcagttcttcgaccccttccatgtcgtcgtcgccgcccagcggaccccaggccgttcttcgtgacgaggaggcagtcgcggttcccgacagaagcggcaccgacacgcccctctcgtccccgtcgctctcgccgactccccggtcggacagcgactgctacttcgtcgacagccgagacgtcgacacattcacacgtaagccccccgcccgccccctccctccccccgtcttccgccactccccttcttctctctcggcctcgcgtggtggcaggtctggccgcctgcctcgcgtggcttcctcctttgcgaccgcaaccacagaccgtcctcgccccccttcttccttcgtgtggctgtgggcatttctgcaggccctcttttccctgcttcgattcccagacttcttcaccaccttttccatcaccatcatcatcatcatcatcacgaagatggtagagatcatcaagcttcagttttgcctatccgggacggccaagctgactcttgcatggggggatgatgatgacttagcagcagcagcagagcccgaaccgcccgcgttcaagtgcccgccggcgacttcggtcctcctccaaggcgacccgtcggcggccaccaagacgctctggctgttcccggacggctccggcctggccatctcgtacctcgacatccccgacctggccgacgacgtggccgtaacaccggacggcatggaccgctgccgcttcgacgacctcgtctccgcctacctgaccgagctgcgccgccgccagccccgcgggccctacctcgtcggcggctggtcggccggcggcctgtgcgcgtaccgggccgcgcagcggctgcgcgaccagtacggcgaggaggtggccggcctggtgctgatcgacagcccgcgcccgggagggcgcaagcggctgccggcgcggctgtacgacgagttcgtccggcgcggcatcttcggcaccgcccccggcaggaagccgccgcccgcctggctgctctcgcacttcaccggcttctcctccatgctcgacaccgtcgacctcctgccctggggtgggggtgggggcggcggcggcccgcggaggaggagcctgccgacgtggatcgtctggggcgcgaacggggtcgacgaggaagagacgatcgagatccgtcccgacgacccggccaacatggcctggttgctgagacggcgccggcccgagcagctgggcgccaatggctgggatgctctcgtgggcggggaccggatccggatcgaggtcgtccaaggggccaaccacttcagcttgatgcggaagccggctgtcatgcaactgggctcgtttcttaagaaggtcgtttcctag

SEQ ID NO: 2945 - protein, 2394 aa, Myceliophthora thermophilia
MAGLSQLIVFGDQAVPYAAELRRFIAKREDFTLAKLLSEAYHALRAEIARLPYSQRTQFPSSSTLTELLNAHCSSSTTPSCALDSALACLHQIAAFVSYFNDTGKKYPKSPSSCLVGTCIGLLSAFAISCSESILDLVDLAPDLILLAFRLGLVVQNRTASVVASGLAAGSSSTTASDSTSVSYAVSGIDGATAASLVDQFCRSRSLAPAARVYVSAVGNGNVTVSGPPAQLRAFLSQHPDLKSARMAMSGLFHSAVLYEPSHIAAVLETLSPRLRRSVGRLDIVPNSEGDPLIIASGMAAEQTLHAILSDILLRPMRWDLVTQRAAELFEKSSSEPSPELDVLPFAAGSVQGLATAIRESRRGGEATVTVADTAGRPRIPSAVAAAAAPGTGSQRDRAKIAIIGYSGRFPEADSNEEFWNLLLAGLDVVKEIPKDRFDPHLYCDPTGKKRNTSGVTMGCFVKHPDLFDARFFGMSPREAEQADPAQRLALMTAYEAMEMAGFVPDSSPSTQRNRIGVFYGTASDDYREVNAGQNVDTYFVPGGSRAFLPARINYHFRFSGPSFDVDTACSSGLAAVHIACNSLWRGDCDVAIAGGTNILTNPDNWAGLDRAHFLTRTGNCKTFDDGADGYCRAESVATVLLKRLDDALLDGDPIQAVILGALTNHSAEAVSITRPHSGAQRAIFSRILESADVDSSDVSYVEMHGTGTQHGDACEMDSVLSVFAPDYSSRRHQPLYLGSAKANVGHAESASGVTSLIKVLLMMEKGQIPRHVGIKTRINRNFPTDLDRRNVRIAMQTTPWPRPEEEAGDAAASSTGRPRRAFVNNFGAAGGNSSVLLEDAPPRRPVSGREDPRPLHVVAVSAKSQSALRRNIRALADHLGANPGTPIGSLAYTTTARRVHYNFRAAVTGRTIDEIRRGLLLAETKEHYATQNGEVPVAFCFTGQGAQYLGMGRRLLEIPQFRSLVANLDEIARLQGFDPVLPVIDGSCSNSSSSSTTTTPLETLLLPPTTVQLAMTCLQMALGKFWISLGLTPKLVVGHSLGEYAAMNIAGVMSDADTIHLVGTRAALLEKHCRVGTHTMLAVRASASEVASLIAARANNRNRHLEICCVNGPEETVVGGPNDEIESFASYLRGMSIKATQLKVQFAFHSAQVEPMLEPFRRSCDGVRFRDPSVPLLSPLLGRVVTAASDLGMPSSYLSRHCRETVNFYDSLRAAKSTGAISDKTVWLEIGPHPTCSNSLKASLASSSSSTTTTTTTRIFPTLRRGEDDWSVLVPTLASLYESGVALSWDDYHRGFKDNLTVLRLPSYRWDLKSYWIPYVHDWCLTKGLPPPVQCNHHELTPKALPAKPKEPFTISVQDLVEEKYGSDESRIVARSDAQHPEFAAILRAHRVNGQPVCSSAVFADMALTLFARLLEKSPVAFDKTDLGVEVRNMVADKSLILNNEPSQLVEMKAQVRWSTRQATFSLSSIDPRSGKQTAHHAKCTGTYSPISGWKTEWGRRQYLVQGRVDHLRQAVDEDDSGVSRIKTGMFYKLFSSLVDYEPPFRGCRELIMRSADFESTAKVKFDNTPAGTADRFKYPPYWLDSLGQITGFTMNANDTLDSNEQVFINHGWENMRLSEPLSDALTYQTYVKMQENGDHRSYVGDVYVFNPLSNRIIAVYEGVTFSAVPRKILDKVLPRPAAGAPATTTTTTSTTTTTTTTAAAAAATGSKPVLMPSPPIAKQQPAATSVAAADKLRAIISEEVGAPIAEVVDSVDLADLGVDSLLALTLSDRILEELGTKVDSASFISGLRFQDLVKLVTGGDQVSVSDAPSSPAAPFIEQGSAVPSPQAVAAKESSRGGRAEAEAAADKLRAIIAEEVGAPIADVVDDVELADLGVDSLLALTMADRILEELDTKVDSSLFISGLKFGDLVRIVTGGATAGGGAGAGISESSSSTSSVSSSTPSMSSSPPSGPQAVLRDEEAVAVPDRSGTDTPLSSPSLSPTPRSDSDCYFVDSRDVDTFTRKPPARPLPPPVFRHSPSSLSASRGGRSGRLPRVASSFATATTDRPRPPSSFVWLWAFLQALFSLLRFPDFFTTFSITIIIIIITKMVEIIKLQFCLSGTAKLTLAWGDDDDLAAAAEPEPPAFKCPPATSVLLQGDPSAATKTLWLFPDGSGLAISYLDIPDLADDVAVTPDGMDRCRFDDLVSAYLTELRRRQPRGPYLVGGWSAGGLCAYRAAQRLRDQYGEEVAGLVLIDSPRPGGRKRLPARLYDEFVRRGIFGTAPGRKPPPAWLLSHFTGFSSMLDTVDLLPWGGGGGGGGPRRRSLPTWIVWGANGVDEEETIEIRPDDPANMAWLLRRRRPEQLGANGWDALVGGDRIRIEVVQGANHFSLMRKPAVMQLGSFLKKVVS

SEQ ID NO: 2946 - DNA, 1629 bp, Myceliophthora thermophilia
atgacagccatgacaggaagcaagccggagcagcccgacagcccgcccaaacagctgcacataggggccatcaaccccttcgcactggtcgaggcgctcctgggccgcaagctcgactgggacaagacatcgacgggctatctgctagctagcatcctgcagaccgactacgaggagctgttcgacatgcgcttccactccatcctgtacgccggcatccgcctcaacgaccgcggcgacaaggccgagcccattccggccaaagagatgcatacgctgacggagcgcgacctcgtcacgcccgacttctccaaggtcgagaagctcggcgatctcggcaagatgggcatcaaggatctcgagagcatccgggtcaagcatgccgccatgtccaacggcaacctgcgcctgacgctggaaccgcgggcggtcggcaagacgctgcgcaactcggagatgacgacgaccctgcgcgagctgtgcacccccttccgcatccacaaggaggccgaatggacgccgcccaacggcacctggaccgatctcggggcctgctactccccgaccgccgccgctttcagcaaccaggtccagggggccaccagcaacagttggctgatcgcggccctgacgagcgtcgcctggtccgacccggccaccatcaagcactacgccggccgccccgcctcttcgaaccacgcctcgtgctgtagccgcggcggcggcggcggcggcggcgacgacgacgacgatgtcgtggccggcagcgccagcgaatgccgactctcgatcaagttccacagcaagggcggcgacaaggacgcgcccacgcgcaccgtcaccgtcaactgcgagctcccgaccaacaagtcgtcctcgatgctcatgtactgccgccccagctccgtcaacgccatgccggtctcgcgcgtccgcgcctgtggaggcggcgatctctggcccgccctctacgagaaggcatttgcccaatggatcaccaccgcgaccaccgacgacgacgatgacgacgagggcatagacgaagacagccacgatggtcacggtcttcaccacggccatcacggccatcacggccaccacggccaccaccacgaccgcagcgaggaggaggaggtgcggcagcagcggaagcaccagcggccggacctgacccagacggcgcacggggacccggtcaaggcgatggcgcagctgacggggcgggaggcgcagtacttcttcacggactcgcggacgggggcggacctgctcgggctcgtgcgcgcgcactgcgtcaaccagcaggccgtgtacccggccgtcgcctggacgcgcccctcgcacccggccttccgcggatgcaccctggccggcaacgtcgcctacagcgtgctcggctgggccgcgccgcaggagcgcaagcgctacgtcatcctgcgccacccctggggcgtgaccgagcccgagggcctcgccagcggctactacccgggcgtcgtcggcggcagcggcagcggcctcgacgtccgcttctggccgcccgccgccatgctcgacagccgcggcgtctttgccgtcgaggccgccgccttcaaggagtactttgccgggttgggcgtcgcaaagtaa

SEQ ID NO: 2947 - protein, 542 aa, Myceliophthora thermophilia
MTAMTGSKPEQPDSPPKQLHIGAINPFALVEALLGRKLDWDKTSTGYLLASILQTDYEELFDMRFHSILYAGIRLNDRGDKAEPIPAKEMHTLTERDLVTPDFSKVEKLGDLGKMGIKDLESIRVKHAAMSNGNLRLTLEPRAVGKTLRNSEMTTTLRELCTPFRIHKEAEWTPPNGTWTDLGACYSPTAAAFSNQVQGATSNSWLIAALTSVAWSDPATIKHYAGRPASSNHASCCSRGGGGGGGDDDDDVVAGSASECRLSIKFHSKGGDKDAPTRTVTVNCELPTNKSSSMLMYCRPSSVNAMPVSRVRACGGGDLWPALYEKAFAQWITTATTDDDDDDEGIDEDSHDGHGLHHGHHGHHGHHGHHHDRSEEEEVRQQRKHQRPDLTQTAHGDPVKAMAQLTGREAQYFFTDSRTGADLLGLVRAHCVNQQAVYPAVAWTRPSHPAFRGCTLAGNVAYSVLGWAAPQERKRYVILRHPWGVTEPEGLASGYYPGVVGGSGSGLDVRFWPPAAMLDSRGVFAVEAAAFKEYFAGLGVAK

SEQ ID NO: 2948 - DNA, 804 bp, Myceliophthora thermophilia
atggcagacaaactcgacagcatactcaagagctacgtcgccgatccggagctggcgcggtggtcgcggtgggccgggcggacggacgacgtgaacagctgcacggtcgagggtggtcgacgccgttcaagttcccgcccggcgaggggtggtactatggcacggggcccgactgggccgggcaggccctcgagcgcgtcaccggcgcccggctcggtcggtacatggaccagcacgtcctcggcccgctgggcctccgcgggacgaccggattccgtgcgcacgagctgcttggggagcgggggacggcggcggcggcgggttggaggagcggccggtacccttccccgccgaccggccgtgcgagagcggcggcgccgggctctactcgagcgcggcggactacgggagggtcatgcaggagctgctgcgggcgctggccggggaggaagggaccgtggtccggcgggagacggcgcactcgacgacaagcagagggagtggctcagggccattgtttggaactttggctcggccgccgaggtgccccggggctcgcgcatcgaccacgggttggggggcatcctggtcctggaggacgtggagggcaggaggaggaaggggaccatgtttttctcgggcatgtgcaatacacgatggtggatcgatcccgagacgggcatcggcgccatcatgcttgtcaatgtcatcccctatggcgactcagccgccctcgccttgttcaacgagctggagcgggctgtatacgggaacctcgtcccggcttggaaagcctcaaagtga

SEQ ID NO: 2949 - protein, 267 aa, Myceliophthora thermophilia
MADKLDSILKSYVADPELARWSRWAGRTDDVNSCTVEGGRRRSSSRPARGGTMARGPTGPGRPSSASPAPGSVGTWTSTSSARWASAGRPDSVRTSCLGSGGRRRRRVGGAAGTLPRRPAVRERRRRALLERGGLREGHAGAAAGAGRGGRDRGPAGDGALDDKQREWLRAIVWNFGSAAEVPRGSRIDHGLGGILVLEDVEGRRRKGTMFFSGMCNTRWWIDPETGIGAIMLVNVIPYGDSAALALFNELERAVYGNLVPAWKASK

SEQ ID NO: 2950 - DNA, 1305 bp, Myceliophthora thermophilia
atggctccccacaccactgagggttccacggcgacagccgtggagggcacaactccggaacactggatcatgggcagaaaggagttcgaacgccgcatgccacaccacgacggcatcaaggcgctttgggaaaccaggtggcggcttccttgcagcaagtccgtctacccgttccacgacggcgcgtacgaggacttcgcccccatctttgaggagctgatcaagcgaaacatcaacgatgcctgcgtcccgtcgtacacagaggccttcctccccactgccgagcgtctcgcgtccctcgccgataagaaagccaccgccagtaccaccaccgccgcaaaggaggcttcggccctgtacctgcgtgcctgcgccgtctaccgcatcgcccggtttccgtacatcactgcgtttccggaggtgaacgacgctgtcaaatggtgtgtcccccatgatcgttttcgtttccttgcttccggccctgtttctctttgcggcctgcttcctccggagtccccagagaagaagatcgagcagagggcgtggcaggcgcagaaggagacatatctgaaggccggtcagctgtgggaatgtcctgtggaggaggttttggtggatcacaagcacgccaagggcaacgacaaggcccagattccggtctacgtgagggtaccgaagctggagaaggagcagaagaaaagaacaaaatgccccgtagtggtcctcatgactgggttggacgggtaccggccggacaatacggtgcggtgcgacgagtttctgcagaggggctggggctccgtggtggttgagatacccggcacggccgattgccccgccgacagcgccgaccctcaatcgcccgaccggctgtggacgagcctgctcgagtggatgggcagcgacggacggttcgacatgaagcgtgtcatggtctggggcctgagctgcggcggatattacgccatccgcatcgcccatacgcaccgggatcggctggtcgggttgacgcctgccatggctatgaagcacgggttcaagtctgtcgatgagtacaaggccaaggcccagaaaaagttctcgcttcttgagacgggcatcatccagagaccgtcgaccaggctgctgctggtcaatggtactcaggacggcctcatgcccgtcgaagactcaatgatgctgttcgagtatggcactgtcaaggaggctcgcttcttctccggcgcgctgcacatgggctatccactggccaatggatctgtgtacccctggatggaggaggtcatggcctcggtgagggactga

SEQ ID NO: 2951 - protein, 434 aa, Myceliophthora thermophilia
MAPHTTEGSTATAVEGTTPEHWIMGRKEFERRMPHHDGIKALWETRWRLPCSKSVYPFHDGAYEDFAPIFEELIKRNINDACVPSYTEAFLPTAERLASLADKKATASTTTAAKEASALYLRACAVYRIARFPYITAFPEVNDAVKWCVPHDRFRFLASGPVSLCGLLPPESPEKKIEQRAWQAQKETYLKAGQLWECPVEEVLVDHKHAKGNDKAQIPVYVRVPKLEKEQKKRTKCPVVVLMTGLDGYRPDNTVRCDEFLQRGWGSVVVEIPGTADCPADSADPQSPDRLWTSLLEWMGSDGRFDMKRVMVWGLSCGGYYAIRIAHTHRDRLVGLTPAMAMKHGFKSVDEYKAKAQKKFSLLETGIIQRPSTRLLLVNGTQDGLMPVEDSMMLFEYGTVKEARFFSGALHMGYPLANGSVYPWMEEVMASVRD

SEQ ID NO: 2952 - DNA, 372 bp, Myceliophthora thermophilia
atggttcagaacggaggtgacttcgacctcgacaccgacatggctaccgacgaactcgagaaccgtgaaaagtactcgcagaagttggttaacgaggcctacgccaaaatcgaggcacttaagggcgccaaagcgaagcgtattaagatcgaactacctggcaaatacggaggaactaaggaggatcttataggattcttgataaatctccgatcttacttccggcttaacgataacaagttcctagacgaaaaagctaaagtcctttatgtagctacgagactagagggcaaggcacttagatggttcgagcctacgtggaataactatctcactaaggaagacgaagacgaccgagatgcgtttatatag

SEQ ID NO: 2953 - protein, 123 aa, Myceliophthora thermophilia
MVQNGGDFDLDTDMATDELENREKYSQKLVNEAYAKIEALKGAKAKRIKIELPGKYGGTKEDLIGFLINLRSYFRLNDNKFLDEKAKVLYVATRLEGKALRWFEPTWNNYLTKEDEDDRDAFI

SEQ ID NO: 2954 - DNA, 510 bp, Myceliophthora thermophilia
atgaacctcccatcatggacatcacaaaacgaacgtcaggggatgaggagaggtaatgaagaaggcggaggctcccaggaaggcgcgagagcagcgaccaaggctcgcctgacactacgattcccaaaagttcaagtatccgttcctgccgtggtcgaccttgaacgaagcgcggacatgggccttacggtcttagtcgctcgtccttaccacacgactccgtccacggtcaggcccagcttctgggcatgtttatcgaccgagaacatgcccacaaaaccccacacggggttaaaagtgctgcgagggcgagggttggtgttaggctcccttgtttgtccgctatcactcgcccttcagccgcccgccttgccggaactcaactggcccgctgagtacccccccgggttgacgtgctcttcgccctcgcttcctatcttaggccgagtcggcacccacccctggatcttcccgaaccgcttgccgctctcccaaatcgtgccatcctga

SEQ ID NO: 2955 - protein, 169 aa, Myceliophthora thermophilia
MNLPSWTSQNERQGMRRGNEEGGGSQEGARAATKARLTLRFPKVQVSVPAVVDLERSADMGLTVLVARPYHTTPSTVRPSFWACLSTENMPTKPHTGLKVLRGRGLVLGSLVCPLSLALQPPALPELNWPAEYPPGLTCSSPSLPILGRVGTHPWIFPNRLPLSQIVPS

SEQ ID NO: 2956 - DNA, 864 bp, Myceliophthora thermophilia
atgtcgaccaccgccgcccccgcccgagatctcccagtcatcaccatcccgccctcacccccgcacccccacacccacacgatcatcttcctccacggccgcggagacaacatcaaatccttcacccgggccctgcgcaaatggcactcgtcgcggggcaccaccctattcgacaccttccccacgctgcgatgggtcttcccgcaggcgccaatgcgccaggtggcgagcacggccaacctgccgcggccgcacatcttcccgcagtggttcgatctgtggacagcgcaggacttcagcgagcgcgaggaagtgcaggtcgagggcttgcgcgagagcgtgccgctgatccgcgacatgatcgcgcgcgaggcggcccagctcgggggccgctgggaccgcgtcatcctggcgggcatcagcatgggcggggccacgagcgtgcacacgctgttcaacctggacatccccgcagagggcggcggccggctggcggcgctgctggccttctgcgctcgctgccccttcgcggggaggagcctgcaggggatgcgagaggtgctcgcccttcccggctctcccccggccggggagaacggagtgctgaggcggacaccggtgctgctggagcacagcgcggacgatccgctggtgctgatcgataacggccggcgactgagagacacgctgaaggggttcggagcgcaggtcgagtggagggagtacataactggcggacactggtttcaggagcccgaggggattgatgatgcgatcgagttcttgcagaagtttgttttcgggccaaatgccggtgagcaaacgcgggctgcggcggattctgttgcgatggatttgtcttga

SEQ ID NO: 2957 - protein, 287 aa, Myceliophthora thermophilia
MSTTAAPARDLPVITIPPSPPHPHTHTIIFLHGRGDNIKSFTRALRKWHSSRGTTLFDTFPTLRWVFPQAPMRQVASTANLPRPHIFPQWFDLWTAQDFSEREEVQVEGLRESVPLIRDMIAREAAQLGGRWDRVILAGISMGGATSVHTLFNLDIPAEGGGRLAALLAFCARCPFAGRSLQGMREVLALPGSPPAGENGVLRRTPVLLEHSADDPLVLIDNGRRLRDTLKGFGAQVEWREYITGGHWFQEPEGIDDAIEFLQKFVFGPNAGEQTRAAADSVAMDLS

SEQ ID NO: 2958 - DNA, 567 bp, Myceliophthora thermophilia
atgttacagcccaccgagggagagttgatgggtcttctttctcaggccccttggggggttaaggctagtcgcacatcgctgacatcggccccaaactgcccgccccagaagccaagaagtagccgtatcggtcttcatctccgctctcctcttattcctattgaggagcaaaggaaagcacccatggaatctgacagctttacgtttcatcgccggtttggagccgtacatgtcatcaagcccagcttggagcatacgcacactgccgtcatgctacacggtaggggaagcaacggcccggaactcgcacaagaactcgagctctggagcactgcctttgaggagacgctgcctgcgtggttttttgaggcccattcgatcacgaacacatcagtcagggaggatttgcagatggatggcattaggaagtcgatcgcttatatccagtcggtcctgagcccagaagccgcaacactcggcggtaagaaagagaaggtggtcttgatgggcatcagccagggggctgctatttgccatgtgaacgctgctgtgccgggagaaccttga

SEQ ID NO: 2959 - protein, 188 aa, Myceliophthora thermophilia
MLQPTEGELMGLLSQAPWGVKASRTSLTSAPNCPPQKPRSSRIGLHLRSPLIPIEEQRKAPMESDSFTFHRRFGAVHVIKPSLEHTHTAVMLHGRGSNGPELAQELELWSTAFEETLPAWFFEAHSITNTSVREDLQMDGIRKSIAYIQSVLSPEAATLGGKKEKVVLMGISQGAAICHVNAAVPGEP

SEQ ID NO: 2960 - DNA, 1173 bp, Myceliophthora thermophilia
atgtcctccgttgtcgtttccaccatacagctggactgttgtcaaaaaaatcctgccgattctgccctggcagccggctgcccggtgaagggccatgtgctcctcagccatcatcatcatcatcctcctcccgtcgcctcttcattcactaactccatgtcggcgtccattaccgccacggaccgagcgctcacaataatcacaaagccgtcccagaaatcggcatatacagcgcccgcatccgctctccggcaggtctgctccggatgcgcccgccgagtccgcctgccgggcccggctttggctcggacgccggggaggatgctggcagcctcgtactcgcaagtctctacagtgcctctcgcatacgagctgcacgagccggccaagcccgtggctgataagcagacatcgcccatcattttcatgcacggtttgtttgggtccaagaagaacaaccggaccatgagtaaagtcttggcgcgcgacttagggcggcacgtttatacattggatctccgcaaccacggtgactcgccgcacgacccgaagcatgactacaccgtcatggccgccgacgtggccgagttcatccgcaagcacggtctgaaagagccgaccctcatcggccactcaatgggtgccaagacggccatggttctcgccctgaaccagccagacctcgtcgccaacctcgtcgccgtggacaacgcccccgtcgacgcccgcctctcgtccgagttcccccgctacatccaggggatgaggaagatcgacgaggccaagacgacgcgccaggccgaggccgacgagatcctcaagccctacgccccctcgccgacgatccgccagttcctgctcggcaacctgcaccggccctcgcccggcgacaggacgcaaaggttccgcctcccgctctccaccctcgcccgcgccctcgaccacctcggcgacttcccctacaaggacccggccgaggcccgcttcgtcaagcccgccctcttcgtccgcggcacccagagcaagtacgtgcccgacgacgtcatccccctcatcggccagttcttccccctgttcgagctcgtcgacgtcgacgccggccactgggtcatttcggagaagcccgaggctttcagggaggccgtgcttcggttcttggagcccaaagagtag

SEQ ID NO: 2961 - protein, 390 aa, Myceliophthora thermophilia
MSSVVVSTIQLDCCQKNPADSALAAGCPVKGHVLLSHHHHHPPPVASSFTNSMSASITATDRALTIITKPSQKSAYTAPASALRQVCSGCARRVRLPGPALARTPGRMLAASYSQVSTVPLAYELHEPAKPVADKQTSPIIFMHGLFGSKKNNRTMSKVLARDLGRHVYTLDLRNHGDSPHDPKHDYTVMAADVAEFIRKHGLKEPTLIGHSMGAKTAMVLALNQPDLVANLVAVDNAPVDARLSSEFPRYIQGMRKIDEAKTTRQAEADEILKPYAPSPTIRQFLLGNLHRPSPGDRTQRFRLPLSTLARALDHLGDFPYKDPAEARFVKPALFVRGTQSKYVPDDVIPLIGQFFPLFELVDVDAGHWVISEKPEAFREAVLRFLEPKE

SEQ ID NO: 2962 - DNA, 1506 bp, Myceliophthora thermophilia
atgacggctcaagcaccagatcccgggcctcgagccgccaacgggccagcgggcagcaaccacaagatgatgcttgccctcctgcccagagtccctctcatgatgcgggtggctctccttcatatgttacgcctaacgccacagtcaaaatacctagacctgcggaccgaggtcgcgatcgccatcttgcgatcgttcactaacccgtcgtcgccccggagcatcacggcgacacagcgaatggctgcccaggctccggagctgaagggcaggatctgggttagcacgtacgcctgcccgcccccgcccgccgaggagagagggctacaggacgccattgcaaaggctatcgacgaactgcgggatcccagggtaccaacgccaacatatgaaatgcccgagcccgcgcatgtcgaggcggagtggacggggtatcgcgccgacgcgacgccgaactcgaggttgccggacctgcccgagagggatctctacgccgaaatgatgaaggaggtcaagagccccgcgacggtgctctacttccacggcggcgcctactacctgctagacccggcaaaccaccgtccgaccaccaagaagctggccaagctgaccggcggacgcgtctactcagtccggtaccgtctcgcgcctcagaacccgttccccgccgcactgatggacgccttgatgtcgtaccttgccctcctctaccctcccgagggcgccttccacgaggctgtcaagccggagcacattgtctttgccggcgacagtgcgggcggcaacctctctctcgccctcctccaactgatcctccacctccaccgcaactcccacaccgtcctctggcacggcgccgctcgggccgtcccgctccccggcggcgtcgccgtcaactccccctggctggacatcacgcactcgtcgccgtcgtgcacggccaacgcggcgttcgactacctgccgacgctggaccagcagctcgcggccgaggcgaggcggccgccctgcccggcgtggccggcctcgccgccgcgcaggcacctgtacgcgcccgactcgctgctcggccacccgctcgtgagcccggtgacggcccggtcgtgggccggcgcgccgcccgtctacgtctgcgccggctgggagctgctggcggacgaggacaagttcgccgcccacaagatgtggcgcgagggcgtcgcggtcgtctgggaggagtacgaggccatgccgcactgcttcgccatcgtcttcccttacctgcgcgaggcgaggcgctgtctggaagggtgggcggccttcatcaaggccgtcgccgagggcgggccaacggcggcggcggcgacgcccgagagccggttcctgacgatccgggcgatgtcgctcgaggaggtggccgtcgagccggacagtctgtggacggacggggaggaggtggtggctgagagggtctggagaaaggtcagggagaggctggtgccggaggagagcgttgccaagttgtga

SEQ ID NO: 2963 - protein, 501 aa, Myceliophthora thermophilia
MTAQAPDPGPRAANGPAGSNHKMMLALLPRVPLMMRVALLHMLRLTPQSKYLDLRTEVAIAILRSFTNPSSPRSITATQRMAAQAPELKGRIWVSTYACPPPPAEERGLQDAIAKAIDELRDPRVPTPTYEMPEPAHVEAEWTGYRADATPNSRLPDLPERDLYAEMMKEVKSPATVLYFHGGAYYLLDPANHRPTTKKLAKLTGGRVYSVRYRLAPQNPFPAALMDALMSYLALLYPPEGAFHEAVKPEHIVFAGDSAGGNLSLALLQLILHLHRNSHTVLWHGAARAVPLPGGVAVNSPWLDITHSSPSCTANAAFDYLPTLDQQLAAEARRPPCPAWPASPPRRHLYAPDSLLGHPLVSPVTARSWAGAPPVYVCAGWELLADEDKFAAHKMWREGVAVVWEEYEAMPHCFAIVFPYLREARRCLEGWAAFIKAVAEGGPTAAAATPESRFLTIRAMSLEEVAVEPDSLWTDGEEVVAERVWRKVRERLVPEESVAKL

SEQ ID NO: 2964 - DNA, 1386 bp, Myceliophthora thermophilia
atgacgacgagcggtccggttgagggacatgctgcgtctgtcgccaaggaagtttctgaatatctcggcattccctatgctctaccacccgtgggagatttgcgatttcagccccctgtccgctacaacgggtcgaggaagatcgtgggcaaggactttggcgcggcatgctttccctccaatattagcgcttacgacgccgacttccccaaggagctgattgacggctatggaattacagaggtcgggcgcaggatcctcgcaaccatcacgaatcccggcataccagtgagcgaggactgcttaaccctgaatgtgtggaccaagccacagaccagcgaaaagcgtaaacccgttatggtctatatccatggcggatcttttgtttcgggtagctcggccgtcccggcgtataatggccaattctttgctgaccaggaagatgtggtcttggtgaccatcaattatcgcgtcaccttcttcggcttccctggcaaccctcacggtcaccagaacctcggcctgctcgaccagcgcatggcagtcgaatgggtccgggacaacatcgccgccttcgggggtgacccctcccgcatcatccttttcggcgagtcggccggcggcgcctcggttgaccactactccttcgcctgggcacacgatcccatcgtctccggcctaatccccatgtccggcacagcggagggcattgccccgctcccggccgcggtcgcctccgagctctggtacaacaccaccgccgccctgggctgcggtaatgcctccacaaccgaccaagccgccgtcctcgcctgcatgcagtcggtccccgccgagtcaatcgtcgccaccctcatcaacacgatcgagtcccccaccccgatgccctactcgccgaccatcgacggcgtccttgtcttcgccgaccctttcccgccgccccaccgccgcccgtgcccatgctcgtcggcaccaccgacaacgaggtcggcctcttccgcgtcttcgtgccgccccggccggacctcccccgcgaggaggaagacgcgttttgcacgccgagaaccagcgcacttcgtctgccccgccgcccgccgcgccgcccgcgccggcaaccccacctggcgctaccgctggcacggcgtgttccccaacacggagctgtcgcgcaccccgcccagcggggcctaccacgactcggaggtggcgctgctgtttgggaatgtggaccagtccttggttacgaacacgcgggaggaggacgccgtcgggaggtacatgcggggcgcgtgggctgcctttgccagggacccggtccgggggctggagaggtatcctctcgaggccgacacggggccgggaatattggacctatgggagcagtga

SEQ ID NO: 2965 - protein, 461 aa, Myceliophthora thermophilia
MTTSGPVEGHAASVAKEVSEYLGIPYALPPVGDLRFQPPVRYNGSRKIVGKDFGAACFPSNISAYDADFPKELIDGYGITEVGRRILATITNPGIPVSEDCLTLNVWTKPQTSEKRKPVMVYIHGGSFVSGSSAVPAYNGQFFADQEDVVLVTINYRVTFFGFPGNPHGHQNLGLLDQRMAVEWVRDNIAAFGGDPSRIILFGESAGGASVDHYSFAWAHDPIVSGLIPMSGTAEGIAPLPAAVASELWYNTTAALGCGNASTTDQAAVLACMQSVPAESIVATLINTIESPTPMPYSPTIDGVLVFADPFPPPHRRPCPCSSAPPTTRSASSASSCRPGRTSPARRKTRFARREPAHFVCPAARRAARAGNPTWRYRWHGVFPNTELSRTPPSGAYHDSEVALLFGNVDQSLVTNTREEDAVGRYMRGAWAAFARDPVRGLERYPLEADTGPGILDLWEQ

SEQ ID NO: 2966 - DNA, 1098 bp, Myceliophthora thermophilia
atgaacgtctttcctggtaccgcgggtattacggcgtgggcccagacagagcaagcggtgcagagcgttgaagatgtgatcgaagagcacattcttccaaaactggatcccgactttctcgagtattttactcaagtgcgaaccaaagcagcagctgggtcggggaaagttgcccccaaacccccatctatccaggaactgcgcgctcatccggaggcattccgagtgccttgcgcccttgacacaaggggatatcccggggttaccgacctcacattcccatcacaggacggcgtcagcatccctgttcgggtataccaccccgaccgagagaagcatggcacaggcccgtttcctgttcatttgaacttccatggcggtggcttcgttgttggcggcctggagtcagaagctgcgcactgtctgagcatgagagaagcaggggttattgttgtcgatgttgactatcgcctttgcccggaaaacatatggggcaaatgttttcaagatgcatgggatgctctgaactgggttcgcgagtctgcatcgctgctcaatgccaacccagcttccgtctcggtcggtggcatatccgcgggcggacatatcagcatagtgctacagcacatggcgcgggatgctggcattcccttgaagttatgcatggctactgcgccaccagcaacgagagcgctgagctatacttactacactgagtcgccgttcccttctttccacgagttccaccgtgggcctgtgctgccctgggcgcaaatcaaatactatggacgcctttgcatgccaccggagaagcttccagagctcaggaagctgtggcccagctggtggctcgagcccctcgaggcgcctaactggcgcggcctttgcgacgccttcattcggacggccgagctcgaccccctgagagatgaaggcgaggcttacgcgatgaaacttgttgcgggtgggaacaaggtcactctcaagagatacttgggctgcccccacacattcgtgtacatggacgccctgaagcggaagcacgagtatgaccgtgattcaatcgctgcgttgagagtggcacacggtctcgattga

SEQ ID NO: 2967 - protein, 365 aa, Myceliophthora thermophilia
MNVFPGTAGITAWAQTEQAVQSVEDVIEEHILPKLDPDFLEYFTQVRTKAAAGSGKVAPKPPSIQELRAHPEAFRVPCALDTRGYPGVTDLTFPSQDGVSIPVRVYHPDREKHGTGPFPVHLNFHGGGFVVGGLESEAAHCLSMREAGVIVVDVDYRLCPENIWGKCFQDAWDALNWVRESASLLNANPASVSVGGISAGGHISIVLQHMARDAGIPLKLCMATAPPATRALSYTYYTESPFPSFHEFHRGPVLPWAQIKYYGRLCMPPEKLPELRKLWPSWWLEPLEAPNWRGLCDAFIRTAELDPLRDEGEAYAMKLVAGGNKVTLKRYLGCPHTFVYMDALKRKHEYDRDSIAALRVAHGLD

SEQ ID NO: 2968 - DNA, 1239 bp, Myceliophthora thermophilia
atgtcaacggtcagcacccaggatggcgcgggcgccaatggcgagcacgaggcagtcatcagaaaagaggtgccgtcattcctgaccaggctttcgtacgccggctacatgtacggcttgaagagcatcttggccgccttcttctggctgcgcgagtggaaggaatcccgcaacccgcccgagggcggccccgacattgtgaagacgtacgagtgccggccacatctccctgttcgcatcttctttccatcctcctacgaccagacctcccccgtcgccttgccgaccctcttcaccattcacggcggcggcttctgtgtgggccaccagcgcgacgatgacgagtggaaccgcgctttcgccgattcttactcggtcctcgtcatctcgcttaactactccaaggcgcccacttaccccttccccgcggcgccccacgacgtcgaggccctcctcttggccgcactagaagacgcctccctcccgatcgaccgcggagcccgcgcgccggccagccgcaccgcaatcctgggcttctcggcaggcgggaacctcgccctgtctgtgtcccagctccccgcggtccgcgcccatcccctggcgccgcgcgcggccatcacggtctacggcagccgtgacatgagatgcacgccacacgagaagctgcagaaccggccgtacaagccggcgctgcgggccccgcgaggcaactggacctggaccgggaccgggacggacccggtcctggcgctcgcgccggcgtccgactggagctacatcccctacggccaagacctgcgcgacccgctgctgagcccgctctactaccgcgaccgggccgccctgcccgccttcgtgggcgtcgtcgccgccgagctcgacatgctcgcgcacgagagctggcgcttcgcctgccgcctgtcgcgcggccgtgccgtgcccgaccgccgcagcgccgaccgcagcgccgacgcccgccgccgcgtctgcggcgacccccacggccgcgtcaccagccgccccggcgagctgatcggcctgctgcccgggagggaggacgagcggttcgcgtttgaggagacgtggctgctcgtgccggacgtgttgcacgggttcgacaacccgcacatgagggccctgatgggcgggaccgagaccatcaaggacgccgagctcaagacggaggcctacagggccgagttggcgaggtggctgaaggaggtggtgtggcgagtgtaa

SEQ ID NO: 2969 - protein, 412 aa, Myceliophthora thermophilia
MSTVSTQDGAGANGEHEAVIRKEVPSFLTRLSYAGYMYGLKSILAAFFWLREWKESRNPPEGGPDIVKTYECRPHLPVRIFFPSSYDQTSPVALPTLFTIHGGGFCVGHQRDDDEWNRAFADSYSVLVISLNYSKAPTYPFPAAPHDVEALLLAALEDASLPIDRGARAPASRTAILGFSAGGNLALSVSQLPAVRAHPLAPRAAITVYGSRDMRCTPHEKLQNRPYKPALRAPRGNWTWTGTGTDPVLALAPASDWSYIPYGQDLRDPLLSPLYYRDRAALPAFVGVVAAELDMLAHESWRFACRLSRGRAVPDRRSADRSADARRRVCGDPHGRVTSRPGELIGLLPGREDERFAFEETWLLVPDVLHGFDNPHMRALMGGTETIKDAELKTEAYRAELARWLKEVVWRV

SEQ ID NO: 2970 - DNA, 873 bp, Myceliophthora thermophilia
atgccaccgtttggccccgttcatattctcgagccccgggctgaacacactcacaccatcatcttgcttcatggccgcggcagcaatggcgaggagtttgcccaagaattacttgagtccaaactctccaacgggaacacactgcaggaacaactcccgacttggcgatgggtcttcccttcgtccgcagagctctgtagcaccgctttccaggagacaatgccggcctggttcgaggcacactctctgaccgacgtcgcctcaaggcaagatctgcagatggccgggatacgcgactcggtacagtacgtgacccgtttgctggacgaggagacggagaggatgggtggggcagctcacagggttgtgctgggcggcatcagtcagggaggcgcggtcgccatgtggaccttgctgtgtgcaggcgatagagacgtcgcccgacgcttgggagggtttgtgggcgcaagcacctggctccccttcgccgagaacctcgagcggtatctgggcggacagaacaggacgaaccacgacgccccggggaacaacgaggccatgggggatgacgtcacgggaggcggcggcgacgacgacgacgacgtcgtccaagtcagtgaggctgatgcgttcgtgaaggccatgaccgcttccgcgagacggactcggcaccagcgtgacgcttctgaggccgaccagcatcctgttccggtgtttctggcccacgggacggacgatgcttttgtggatgtcgagctcggacggcacgcggcacgcgtgttgaggaagggttgggttgaaggtctcatggacggagtactctggggcggatcaggaaggtcattggttgaaagaaccggaggagttcgatga

SEQ ID NO: 2971 - protein, 290 aa, Myceliophthora thermophilia
MPPFGPVHILEPRAEHTHTIILLHGRGSNGEEFAQELLESKLSNGNTLQEQLPTWRWVFPSSAELCSTAFQETMPAWFEAHSLTDVASRQDLQMAGIRDSVQYVTRLLDEETERMGGAAHRVVLGGISQGGAVAMWTLLCAGDRDVARRLGGFVGASTWLPFAENLERYLGGQNRTNHDAPGNNEAMGDDVTGGGGDDDDDVVQVSEADAFVKAMTASARRTRHQRDASEADQHPVPVFLAHGTDDAFVDVELGRHAARVLRKGWVEGLMDGVLWGGSGRSLVERTGGVR

SEQ ID NO: 2972 - DNA, 1089 bp, Myceliophthora thermophilia
atgctctacatccacggtggcgcctactactttggcagcgtcgacgagcatcgctaccagatccagcgccatgcgcggaagctcaaggcgcgagctctggccccgagataccggctcgctccccagttcccctttccctgtggcctccaggactgcctcgccacgtacctctacctcatctcgcagcagaggccaaacacaatcatccttgccggcgactcggcaggcgctggcatggtcttgagcctgatggtcattctcagagacaggggcatcccgcttccggcgggcgccgtgctcatcagtccctgggtagacttgacgcactcttttccgagcgtcgccggggactgcccgctggactacctcccaccgtcgggcttccatcacaagccgtcgctggcatggccgcctcccgacgaggaagaactggaagcgctcaagaaggcggcatcggtgcagaaaaagagcatcgtcgcgcaagaaggccggcatgctgaagagagcggcatgccaacggtccaggacgttgccaagaccacgcaccgcatgacatttgtcattgacggcgagcaagtcgaaatcaaggagcagattcagatgtacaccaccaacgagctgctagcccacccgttggttagccccgtcatgcaacccaccttgggcggtcttccacctctgctcatcatggtcggaggcggtgaattgctgcgcgatgagcagatataccttgcacacaagtgtgccaaccctgcgcaatacctgccgcccgaagccttgatgaacgaggaggccaaagcgttggtcgaccgatataaacccacggatgttcagctgcaggtgtgggacgacctgtgccatgttgctcctacgctcagctttacgaggcctgccaaatacatgtataggagtgttgcgcagttttcggcgtgggcattggcaagggcccagaacaccgaggttgatattctctgcgacgacgagatctcggtcatttcgagctcgagctcaagctcgagctcttcgagcgggagccaggagaagaaggtttctcaggcgacccccttccggcctttgaaaaccacatga

SEQ ID NO: 2973 - protein, 362 aa, Myceliophthora thermophilia
MLYIHGGAYYFGSVDEHRYQIQRHARKLKARALAPRYRLAPQFPFPCGLQDCLATYLYLISQQRPNTIILAGDSAGAGMVLSLMVILRDRGIPLPAGAVLISPWVDLTHSFPSVAGDCPLDYLPPSGFHHKPSLAWPPPDEEELEALKKAASVQKKSIVAQEGRHAEESGMPTVQDVAKTTHRMTFVIDGEQVEIKEQIQMYTTNELLAHPLVSPVMQPTLGGLPPLLIMVGGGELLRDEQIYLAHKCANPAQYLPPEALMNEEAKALVDRYKPTDVQLQVWDDLCHVAPTLSFTRPAKYMYRSVAQFSAWALARAQNTEVDILCDDEISVISSSSSSSSSSSGSQEKKVSQATPFRPLKTT

SEQ ID NO: 2974 - DNA, 1011 bp, Myceliophthora thermophilia
atgtatccggtcgacatcctgaaccagcggcacacgagattcgttctctgggtcccacagtcggacagctcgacagcccaaccgccggttctcgtgatcgggaccacggacaagggtgctggtgtcttccaagagattggacggttccctctcgctcactcagacggggttcagttcctcgccgatgtggtgatggcgtttggccatgatccatacagctacattgatttcgacaacttccacctcaagccggaccttgagccagacaacccggatagctaccagtcggataggaacgggcagctgcgggacggtttcggcggcaactcgtggcgtcgttatatccgctcagtccattcatacgatcccgagacaggggacgtccattctgcggtccatccctcgtgggccttccaccgctgccatttagcccggtggatgacgggttttggcgcggtgaactacatcacgtcccacgacattgaaggccccccgaaggcgaggctgtacaacttccttatcggcaacgggataagagacgttgagaagcgaaccaaactggcttttgcgctgttgttgaccagcgtcggaacccctatgatattcgctggtgaggagttcgccgaccagatggaccgcagcgtcgacatgggcaagaagcagagtgacccggtcaactacgagcggaagaacgacggcgggtggcggcaggccctgttcgggtatgtcgccaacttggtcagattccgggccaagtgtcctgccctaggggaggacgacactgagttcttgcgcgtcgatgtgagccgtggcgggcgcatcatggcgtggctcaagggcgatgagaacaaccccggggcagagaatgtgattgcaaactggcccgacagagaccaggacggctggcgggagatttcacaaggcagagaggttccgcttgagtgggttggtcgcgagccgctggcggcctgggaagccaaagtttacacgcgttggactgagcgcccctga

SEQ ID NO: 2975 - protein, 336 aa, Myceliophthora thermophilia
MYPVDILNQRHTRFVLWVPQSDSSTAQPPVLVIGTTDKGAGVFQEIGRFPLAHSDGVQFLADVVMAFGHDPYSYIDFDNFHLKPDLEPDNPDSYQSDRNGQLRDGFGGNSWRRYIRSVHSYDPETGDVHSAVHPSWAFHRCHLARWMTGFGAVNYITSHDIEGPPKARLYNFLIGNGIRDVEKRTKLAFALLLTSVGTPMIFAGEEFADQMDRSVDMGKKQSDPVNYERKNDGGWRQALFGYVANLVRFRAKCPALGEDDTEFLRVDVSRGGRIMAWLKGDENNPGAENVIANWPDRDQDGWREISQGREVPLEWVGREPLAAWEAKVYTRWTERP

SEQ ID NO: 2976 - DNA, 414 bp, Myceliophthora thermophilia
atgacgcctcttatgcttgaatcaatagatgactcgttaggtctacctattacaaacactataactgctagtaggtcgactcctgctcctataacacctcgtaagtataagtatactaaagcttctataccttttcttagtagttctagcgatttaagcgagtttacgtggttcggcttcttctgcgctttactagtcacgtctagatcgtttaagctgactaaatatagcaacatcgaagctagcgagctttttcctataagtgtagggagatatacgttaatcgcctatacgtctaatagctcttataatacttatactaactataatggtagtcttgcttcttatattaggtcggctaaggacttaacgaaggctctaatggatagagctaaggcttctataagtccctag

SEQ ID NO: 2977 - protein, 137 aa, Myceliophthora thermophilia
MTPLMLESIDDSLGLPITNTITASRSTPAPITPRKYKYTKASIPFLSSSSDLSEFTWFGFFCALLVTSRSFKLTKYSNIEASELFPISVGRYTLIAYTSNSSYNTYTNYNGSLASYIRSAKDLTKALMDRAKASISP

SEQ ID NO: 2978 - DNA, 2538 bp, Myceliophthora thermophilia
atggcaaacgacgccgaggcgctcagtcagccgcttacgtcgaggtataaggcctcgatcgattacgccaaagatgccgagggcatgaaagtgccctatgccagccaggatgcgcacgaaatcgccaccatgattcgcggcctcgaagagtgcagcaagaaggggaagaaccgcggcgcaagaaagactaggtatgccgtttcttcgtctccgaccggaatcacggtcgactcttggcgatttcaggaatcggactacaagcggcgtgacctgccaacatatgcgcgcggcttgttcactactcagacgaagcaacacgtccccgagattgccattcgcggctacgacaagttcttcaacattgacgaggtccgagaaacctcctgggagcatattaaggagcgcaccaaaggcccttacgaactcagcctaaaggagaacggctgcatcatcttcattagcggtcttgaagacgacacactgctcgtctgcagcaaacactcgaccggtgacaggtctgatgtcgttgccagtcacgcaagggtgggtgagcagcacctcgaacgccagctagagaagattggcaagaccaagcaggacctggcgcgggagttgaggaaacggaatgccaccgccgttgccgagctgtgcgacgacagcttcgaggagcacatcctagcctacggtccagacaaggccggtctgtatctgcacggcatcaacatcaatatccccgagtttatgacatatccatctccactggtccagaaattcgccgaagactggggcttcatcaagaccggcctgattgtgatcgacgacatcaacgaagtgaaggccttcttggaggaggtcgccgagacgggagcccacgatggccgtgacgttgaaggtttcgtcatcaggtgcaagagatccagcaaaccgggcgaggttcccgatcaggactggttcttcaagtacaagttcgaggaaccgtacttgatgtaccggcagtggcgtgaagcgacaaaggctctcatctctggaaagcaattcaagctcaagaagcacgtcaagatcaccgaggagtaccttctgtacgctcgtcaacgcctggctgctgatccgcacttgaggaaggcttactgccagaatcatggaatcatcaagctgcgcaacgacttcctcgagtacaaaaaccttaaggggtctgatgccgccaacctcgaagacgacagcggtgcctcaaacgtgactcgcgatgtcatccttgttccaattgcgacgatcggctgcggcaagacaaccatcggcctcgcactcaccagcctatttggctggggccatattcagaacgacaacatcactgggtccaaacggcctccgcgattcgtgaaggcggtcctggaccagcttgaggagcatcccgcagtttttgccgaccggaacaatgccatgagacatgaacgaaagcagatgatcacggatgtcaagatgcatcatctggcggcgaaactggttgccctcaactttgtgcacgacgacattgatgccgtccgtcaagtcacccgagagcgggtgttcgcccgcggtgacaaccatcagactatccaggccgccacagacatgaacaaggtcgtcggtatcatggagggtttcattcatcggtttgagccgtgtgatcccgagcgtgagcccgactccgactttgatgccatcatcgatctggatcccactgccggatccagggagaacctcgaaatcgtgatcagggaactgcatcgccagttcccgaactttgtcaaggaagttccttctgccgaagacatggaccgggccgtccaaaacgccatcgacagctacaagcctgacctgcgtcacaatattcccgaccgctccaagaacgattccaagaagaaaaataaagagcagcagcagcaggaacagcagcaggctaacgagaagcccaaaaagaagaaaccactcgaatacatgtccgttgatgtccccaccgcggatgttctcacggctctcgaaaagaccttctcccaggaccttccggcgtcgaaaacccgcttcttcaaacaacttcaaggcactcgccgcgtgcaggccaagttccacgtcacactgatgcatcgtgctacagccaaggagcacccggaactctggcagcgctacacgaccctccaggacacggacggtgcgatccacccggacgggcggctgggcgagctggacgtgcagctcgagcgcgtggtctttgacgaccgcatcatggccatcgtcgtacgcctggtgcctacgaacccggaggacgagaacataaacgccgacaatccggcgctgccagcaaagcctaagtgggagtgcgtcaaccgtgtggcgcacatcaccgtcggcaccagagatgattcggtcaaacctaaggagagcaatgacctgctggcaaggtggctgaaagttggcagcggagaggagaccgggattggggagctgttgatcgaagggaagccgctcatcaggggcgtcgtgaggggtgtcttggcgagatag

SEQ ID NO: 2979 - protein, 845 aa, Myceliophthora thermophilia
MANDAEALSQPLTSRYKASIDYAKDAEGMKVPYASQDAHEIATMIRGLEECSKKGKNRGARKTRYAVSSSPTGITVDSWRFQESDYKRRDLPTYARGLFTTQTKQHVPEIAIRGYDKFFNIDEVRETSWEHIKERTKGPYELSLKENGCIIFISGLEDDTLLVCSKHSTGDRSDVVASHARVGEQHLERQLEKIGKTKQDLARELRKRNATAVAELCDDSFEEHILAYGPDKAGLYLHGININIPEFMTYPSPLVQKFAEDWGFIKTGLIVIDDINEVKAFLEEVAETGAHDGRDVEGFVIRCKRSSKPGEVPDQDWFFKYKFEEPYLMYRQWREATKALISGKQFKLKKHVKITEEYLLYARQRLAADPHLRKAYCQNHGIIKLRNDFLEYKNLKGSDAANLEDDSGASNVTRDVILVPIATIGCGKTTIGLALTSLFGWGHIQNDNITGSKRPPRFVKAVLDQLEEHPAVFADRNNAMRHERKQMITDVKMHHLAAKLVALNFVHDDIDAVRQVTRERVFARGDNHQTIQAATDMNKVVGIMEGFIHRFEPCDPEREPDSDFDAIIDLDPTAGSRENLEIVIRELHRQFPNFVKEVPSAEDMDRAVQNAIDSYKPDLRHNIPDRSKNDSKKKNKEQQQQEQQQANEKPKKKKPLEYMSVDVPTADVLTALEKTFSQDLPASKTRFFKQLQGTRRVQAKFHVTLMHRATAKEHPELWQRYTTLQDTDGAIHPDGRLGELDVQLERVVFDDRIMAIVVRLVPTNPEDENINADNPALPAKPKWECVNRVAHITVGTRDDSVKPKESNDLLARWLKVGSGEETGIGELLIEGKPLIRGVVRGVLAR

SEQ ID NO: 2980 - DNA, 165 bp, Myceliophthora thermophilia
atggtgacggcccggcagcctgcggtgtcgtcagctcggagctttctccggatccccatcctccgcctgcccagtgctggcaactggcttttcatcaacgacacagcagcagcagcccactggcaggagcatggaagctggcctgccgtgctctggaaagcatag

SEQ ID NO: 2981 - protein, 54 aa, Myceliophthora thermophilia
MVTARQPAVSSARSFLRIPILRLPSAGNWLFINDTAAAAHWQEHGSWPAVLWKA

SEQ ID NO: 2982 - DNA, 1146 bp, Myceliophthora thermophilia
atggcgcgatgccgaggcgttgttgaacccccggtcattggcatcctggtgcccggtggatgtcctgtcgactggggccagagaattggtggatccgcttcctcggctgccggcatcgctcgcgagcacatccacccacagcgcgagaaccggcgtcgtcccgttttctatatagacccgcgaactgcctggttcgggggccggcctccagtatgtcttcaagactaccttcgagcgcgagccgctggacttgggctctcccgttacggacccccaatcgcctcactcgggcatccttctcccggttcatcgcgactgctgctggattcttacactcgctcctttgaaccaggtgcatcctctcccacggccaccacaacccccttgatacgccgtgctgcatcgattaccggtcgcgtcctcctctttaccacgctcggctttgccatggcagcggcaccagcctacaagtcggcagtcgaagtcctgtcccctccaagcgatgccgacgcactggaatcatttcttccgcaggacgacgaggcgaaggccaaggaggactatattaactcgcacccacttacggcggcgcttcgggcggacccgaacttgatcgagtcgcgccctcacatgaagataccggcgtcatggcgcaagcataacctgaccgggggcactcttattgggccgggcaagatggtcacgccgccatttagctggacagatagagaggggaggagatacgtgcagatcgcccacgtgggaacggatctctgcggccacatgggcgtgatccacgggggattcttggctaccatgctggacgagggactggcaaggtgttgctttcccgtcttaccctacaatgtgggtatgacggccaagctcgagatcaactataaggcccccgccatggctgatcagtaccttgtgcttcgggcgacaactatcaaggtagagggtaggaaagcatgggtcgagggtcagatcgagaccctaccggaagatgaaaaccaacaaccaaccgttctggcgacggctagcgcactttacgtctcgcccaaacaggcgtcggtgcgtaccctgctcatccccaaccacacagccatccgcccaacctttcttgagaagcatgggtttcgctga

SEQ ID NO: 2983 - protein, 381 aa, Myceliophthora thermophilia
MARCRGVVEPPVIGILVPGGCPVDWGQRIGGSASSAAGIAREHIHPQRENRRRPVFYIDPRTAWFGGRPPVCLQDYLRARAAGLGLSRYGPPIASLGHPSPGSSRLLLDSYTRSFEPGASSPTATTTPLIRRAASITGRVLLFTTLGFAMAAAPAYKSAVEVLSPPSDADALESFLPQDDEAKAKEDYINSHPLTAALRADPNLIESRPHMKIPASWRKHNLTGGTLIGPGKMVTPPFSWTDREGRRYVQIAHVGTDLCGHMGVIHGGFLATMLDEGLARCCFPVLPYNVGMTAKLEINYKAPAMADQYLVLRATTIKVEGRKAWVEGQIETLPEDENQQPTVLATASALYVSPKQASVRTLLIPNHTAIRPTFLEKHGFR

SEQ ID NO: 2984 - DNA, 1077 bp, Myceliophthora thermophilia
atgggctccaaaatacagtaccgccacctgctgaggctggcccggcgccggcaaacggcgcttcccgccagattccctccaacaacgccgtcgctcctcgtgtcgcggttccagcacctccagcccttctcgacctccccgagcacgcggcaagaacagcggcacgaacccagccagcattccgcgttaggaggatccgccgccgattccacggcgaaaattgcagcaccgacggcgacgggctcaccaccaacaataccaccatctcctcctcctccgaccgacccttccctccccgcaggccacgagcaacaacaagaacaacagagcaccaagaagaagaagaggccaccacgtcaggcccgtggccgcctctttctcgccctagccagcaccctcgtcggcctgtccctcgggtccgccgtgcgcgtgctggtgtccccccccaaccctccggaaccgaatacagaggaggatgagtacacgattcgaatcatccgcgagcaggcggccaagctgccgatcgtgcagcagatgacgggcgacccggagcagtgggagtggtgggacgcgtacgagtcgctgccggcggagcaccgggcgcagcacatctcggcctcggcgctggcccggcgcgtcttctgcaaccggagcacgggcgagctcgtgagcgtcatccacttcggcagcgccaccaccagctggcccggcgtcgtccacggcggctgcctggccaccatcgtcgacgagagctgcggccgcgccgccttccgggaccccgagtggggcggccgcgtcggcctgacggcccgcctgacgctcgagtacaagaagccgacgctggccaacaacttctacgtcgtccgcgcccgcgtccgcccggacgaggagctgcccgagtcggagaggggcaagaggcactacaagtgctggatcgacgccagcatcgaggacgcccgcaccggcaccgtgaccgtcaccgccgaggcgctcttcgtcggcggcaagggcaacggcaagacgaagaaatccccgcttggcggcgacgaggcgcggcagaagcatgtcaagttctga

SEQ ID NO: 2985 - protein, 358 aa, Myceliophthora thermophilia
MGSKIQYRHLLRLARRRQTALPARFPPTTPSLLVSRFQHLQPFSTSPSTRQEQRHEPSQHSALGGSAADSTAKIAAPTATGSPPTIPPSPPPPTDPSLPAGHEQQQEQQSTKKKKRPPRQARGRLFLALASTLVGLSLGSAVRVLVSPPNPPEPNTEEDEYTIRIIREQAAKLPIVQQMTGDPEQWEWWDAYESLPAEHRAQHISASALARRVFCNRSTGELVSVIHFGSATTSWPGVVHGGCLATIVDESCGRAAFRDPEWGGRVGLTARLTLEYKKPTLANNFYVVRARVRPDEELPESERGKRHYKCWIDASIEDARTGTVTVTAEALFVGGKGNGKTKKSPLGGDEARQKHVKF

SEQ ID NO: 2986 - DNA, 654 bp, Myceliophthora thermophilia
atgactgaatcaccttcaactgcgcgtcaaacgcggcgaacgagaattgtgtgcatcagcgacacacacaataccacggtcaagctgccaaagggcgatgtcctgatacatgcgggagacctcaccaaccaagggagttattctgagctctccaaggccgtccagtggctggagaaggctgactttgaagccaaaattgtcattgcaggaaccacttttaccatctttgggtctccctacagtccccagtacggcacgtgggctttcatgtatccccagtcgggtcatgaaccgagcgcgtcgggctcggacagtgcggccggagtgagtccaacggcggcagagctctgggaggctatccccctcaacaccgacatcctcgttacgcacacgccggcctacgggcatcgcgacgactcgtgtggagctgcgacgttgcggcgagccctcgcccgggtacggcctcggctgcacgtctgcggccacgtccaccaaggtcgaggcgccgagcgggtaaaatgggacacggacagctcccgggccggagacggagtcactgcggtcgaggcttcggtcgaagcatgggtggaccccagccctgatccggcctcggccaagatcagcttggtcgacctcacggcgcgccgcgggtaa

SEQ ID NO: 2987 - protein, 217 aa, Myceliophthora thermophilia
MTESPSTARQTRRTRIVCISDTHNTTVKLPKGDVLIHAGDLTNQGSYSELSKAVQWLEKADFEAKIVIAGTTFTIFGSPYSPQYGTWAFMYPQSGHEPSASGSDSAAGVSPTAAELWEAIPLNTDILVTHTPAYGHRDDSCGAATLRRALARVRPRLHVCGHVHQGRGAERVKWDTDSSRAGDGVTAVEASVEAWVDPSPDPASAKISLVDLTARRG

SEQ ID NO: 2988 - DNA, 636 bp, Myceliophthora thermophilia
atgggcggtcgagtactctttgtgagagggatgaaccgccgccctgatgcgctttcagtgcactcagttggaccctcctcgcctcagacttcaacgtgttcaggcatccgcgaccgcgcgatcggcacgcgattgtttccgattccgggaagtcgccagctttgcctgcttcaacagagtttgcccacgtcgtttgggcatcctatattctatcgtacctcagtcgctgcacggagacatcatcaggccgtgaatgagggagaggctggcccgctcagcatagatgccgggggcggcctgtaccagatgctttgcggtccggtctcccgtccaccaccgatgtaccagaagccgctgcttgagtatccctggttggcatttgagctgtggttgttcaaggcagaggagacggagctagagcgccagagcacgggcgacgccgccgacgccgccgattccgagggtgaaggctggggaaaccggcacataagggtgctgctgcagagtgtccacgacgatgatgacaacgccgccttcgccgggaagcgatgggggggagaggccctggacaccctggacacggagctggtggaggtgatatcgtttatcctcggctcgccaataaagctcctgtag

SEQ ID NO: 2989 - protein, 211 aa, Myceliophthora thermophilia
MGGRVLFVRGMNRRPDALSVHSVGPSSPQTSTCSGIRDRAIGTRLFPIPGSRQLCLLQQSLPTSFGHPIFYRTSVAARRHHQAVNEGEAGPLSIDAGGGLYQMLCGPVSRPPPMYQKPLLEYPWLAFELWLFKAEETELERQSTGDAADAADSEGEGWGNRHIRVLLQSVHDDDDNAAFAGKRWGGEALDTLDTELVEVISFILGSPIKLL

SEQ ID NO: 2990 - DNA, 1467 bp, Myceliophthora thermophilia
atgtatccattcttcacatactcgcccaaccgccattacttcgaatacaaatggtacaaccttgagctgctgcggctgctgggcgccgcgccatacgggggttgcgacgctgccgagttcctcgagcttgtcgcctcgctcattcccaacgatgctgacgactggaaccgcaaattcttggccctggctgagaggacgcagtcgtgggccgaggagatgcagagaaacggccacctctcggccgccaggggcgcgttcctgcgcgccagcaactacttccgctgcgcgcagtacctattcccgatcatgcccgccgaagagcagccctacttcctgtccctataccaccgcagcatctccaactttgagcaggcgaccaagctgatggagcacgacgtacgccgcgttcgcatcccgttccagccgcccgagtaccgcgcaccgctcctccgacttcccggatggctgcatctccccgccccgtctcgacgtctcaagggacgcaagacgcccgtcctcatctgcatcggcggcgccgactccacccaagaggagctctacttcctccacgtcgccgaagggccaggcctgggctacgccgtcctgacgttcgacggcccaggtcaggggctcgtcctgcgggaggacggcgtgcccctgcggcccgacggcgagatcgtcgtcgaggcagtcctggacttcctcgcctcgtacgccgaggagcaccccgaggccgacctcgacctcgacgccgtcgcggtcacgggccagtccctgggcgggtacctggcgctgcgcggggcggcggacgcgcgcatcaaggcctgcgtcgccgtcgacccggtctacgacttctacgacctcgccatgtcgcgcatgccgcggtggttcatgtggccgtgggagcgcaactacatgggcgacggcttcgtcgacttcgccgtccgcgagcacgccaagctcgacgtcgccaccaagtacaccttcgcccagggctgccacatgttcggcagctccaacccggcccagatgatccgcgacatgaagcagtacaccttccgcctcgacaggaccgtcacggccgacaacaagaaccgcgggcgcgccaaccgggactacctcgagtgggtccgttgccccgtcctggtcaccggcgcggggggtgacccgaagctgttcctggccgagatgagcacgtcggccatcatgagaaacctggtcaacgtgcccgaggggcagaaggagctctgggttcccaaggcctggtccgagggcggcgcccaggcaaagtctggcgcctggccgctgctgcagtaccggactttcaagttcttggatgagaagctgggcatccagaggccgtcgagtccgaagagggtgtacgagaacggatatgaaaatgggtacacaaacggcttcgtgaagaacgggtacgaaaacggctttgtgacaaacggctatcactga

SEQ ID NO: 2991 - protein, 488 aa, Myceliophthora thermophilia
MYPFFTYSPNRHYFEYKWYNLELLRLLGAAPYGGCDAAEFLELVASLIPNDADDWNRKFLALAERTQSWAEEMQRNGHLSAARGAFLRASNYFRCAQYLFPIMPAEEQPYFLSLYHRSISNFEQATKLMEHDVRRVRIPFQPPEYRAPLLRLPGWLHLPAPSRRLKGRKTPVLICIGGADSTQEELYFLHVAEGPGLGYAVLTFDGPGQGLVLREDGVPLRPDGEIVVEAVLDFLASYAEEHPEADLDLDAVAVTGQSLGGYLALRGAADARIKACVAVDPVYDFYDLAMSRMPRWFMWPWERNYMGDGFVDFAVREHAKLDVATKYTFAQGCHMFGSSNPAQMIRDMKQYTFRLDRTVTADNKNRGRANRDYLEWVRCPVLVTGAGGDPKLFLAEMSTSAIMRNLVNVPEGQKELWVPKAWSEGGAQAKSGAWPLLQYRTFKFLDEKLGIQRPSSPKRVYENGYENGYTNGFVKNGYENGFVTNGYH

SEQ ID NO: 2992 - DNA, 528 bp, Myceliophthora thermophilia
atggcaaaccttagccagctcaagcgccggaccagagccgattacccctacattcttgagtaccgaacgcgatggtatttggcctcccgtgcccacaaccaccgaacttttaccaaagctgatcagaccaggaccgacaatgacatgtaccaccacatgaataattccatctataacttcctgtacgactcggtcatcaacacctatctcatagaacactgcgggcttaatccgcaatcttctccgcaatatgggatggttgtccactcccataacgactacttctcgtccatctccttcccctcacgtgcagagcttgcgttgcgcgtcaaccgaatcggaaactcgagcgtcacttacgagatcgccctattcgagcatggtaaagaagctgtcaagtcagttggggagtttgtacaggtgtttgttgatcgtgacaccgcgaggcctaatcccaagggcatggaccctaagatgagacaaggtcttgaacgaatcctggtttcagaccggcagagcaagctttaa

SEQ ID NO: 2993 - protein, 175 aa, Myceliophthora thermophilia
MANLSQLKRRTRADYPYILEYRTRWYLASRAHNHRTFTKADQTRTDNDMYHHMNNSIYNFLYDSVINTYLIEHCGLNPQSSPQYGMVVHSHNDYFSSISFPSRAELALRVNRIGNSSVTYEIALFEHGKEAVKSVGEFVQVFVDRDTARPNPKGMDPKMRQGLERILVSDRQSKL

SEQ ID NO: 2994 - DNA, 321 bp, Myceliophthora thermophilia
atggctagcgagaagggcgcgctccaggtgttcaaacgtaatgcgggtcagcagccaggaccgagccagaggccagaagggcaggagaccggaccaaaaaaggacagcctggagctcgacggagctgcagcaccgaaagtggaacgcatccacaactcgatcggccaccgcatccccaagaccttgctttcgggccacctggcgcaaacggcaattcagttgcactcgaccgcaccggattctgattcttgggaaagcattgttcccaaagcgtctctgattatgagccaggtcatcttctccgaacaaggtccccggtga

SEQ ID NO: 2995 - protein, 106 aa, Myceliophthora thermophilia
MASEKGALQVFKRNAGQQPGPSQRPEGQETGPKKDSLELDGAAAPKVERIHNSIGHRIPKTLLSGHLAQTAIQLHSTAPDSDSWESIVPKASLIMSQVIFSEQGPR

SEQ ID NO: 2996 - DNA, 627 bp, Myceliophthora thermophilia
atggttaaccggttcatcaattacaagccgccgttccccggggacacaggttcgccgtctggcgctgacgcgtttctcgactttatcgagggggctctgcctccttggcttcatgacagtatattcccgaatgtagcgttcacctgcgacgccgcgcttcgaaactctttcggcggactcctggttgccttttcgctgatctcccgcccagccatgttcgacacatatctggcggcgagccctgctctggaagtaagtgcaaaacagctgcatcctggccgaggtcgcgtctcggttcggaattggcgatccgacaacatcggcctagtacacctcttctggatgcaaccaaacctcgaacatgccggcgctcatgatcacgtacggaaagccatgagcagtgtccggcccgcaggcgtaccgaaaacgaaacggcattccaggcggggaagagctaattacttccggcctcttggaatgacggaacactgccacgacctgttcgatctggtgaaagcgagtagaaaggttagcgatgttgtgctcaacgagtacgcgggacaggaccacgcgggcgttgctgcgagcgcaatcaccgagggcattgactactttgtcgactggtaa

SEQ ID NO: 2997 - protein, 208 aa, Myceliophthora thermophilia
MVNRFINYKPPFPGDTGSPSGADAFLDFIEGALPPWLHDSIFPNVAFTCDAALRNSFGGLLVAFSLISRPAMFDTYLAASPALEVSAKQLHPGRGRVSVRNWRSDNIGLVHLFWMQPNLEHAGAHDHVRKAMSSVRPAGVPKTKRHSRRGRANYFRPLGMTEHCHDLFDLVKASRKVSDVVLNEYAGQDHAGVAASAITEGIDYFVDW

SEQ ID NO: 2998 - DNA, 3327 bp, Myceliophthora thermophilia
atgcccggcgtctctggaaggcggtccggaaagcgccatccgaaggaggtatcagcaccgaccaagcttgcgcatgtccccagaaaaaggcgatccgcactgacggcgccgggatgggccctcgcaactgcgcttattgccagtactgccgtctttctcgccttcaacatgctcgcagccccatttggtctgtcgcgcgggccacggctgccggaaaaggctttgcgctgcaaccgagtgttctttggtgatgtgctccctccagatgcgacccttgagaaggtcgcggtggtccgggagggcgggagctacggcgagggcgaggcaaacgtggcatactcggtagacccgaccggtcttccagcattgtgtgtcattaccgttcgggtgaggagctcttcgacgagcagctaccggcttggcctctttctgccagataagtggaactcgaggtttctggtggtaggaaacgggggcttcgcgggtggcatcaactggttggacatcctgtacaactttcccgtaaccgaccccaaacacctctccgttgccgacaccgcccttatcgcagacgaagtcatccggcaatgcgacctggccgacggcgtgcaggatggcattgtcagcaccccggatcggtgcgccccggagctgactgttctcctctgcagcggcaaagacaacggggccaagaacgccccaacgtccgggaaggcagattgtctccgcccggctcagctcgagaccgcccgaaacgtctacagcgactggacccttccgcccaacaacgagctccttcatccgggtctgaccttctcctcggagggagaatggttgctcatcctcaacggctccgagccggtgccctacgggatcggatacgcgcgcgacttcctgttcgacgacgacggcggcggcggcggcggcggcagcggcagcgatgccccgccgtgggactggcgcacgtccttcaacgagagcgtcgtgcgctacgccgacgagcacgaccccgggaacgcgacggcggacgactgcgccgcgctgggggccgtccgagagaggggcggaaaggtggtgatctaccacgggctcgcggacgggctggtgccgacaaaggggaccggcgtgtactggaatcggacgttggatgccctgggcggcctgggcggcctgggcggcctggaggacttcatgaggctgtttctcgtgcccggcatgggacattgttacgggacggccgtagacgcgccgtggaacttcgggggcgcatttcaggcgggcctgatagggagcggggtgtggtcggtgccggggttcgaggatgcggagcatgacgccttgatggcgttggtcgactgggtcgagaaagggaagcccttggacagcattgtcgcgacaacggcacaagagaccctgctggttgggtgggctccaggcaacccctctgccccgcacccgagatttttggcttcgcctctcatcgcgtcgcgtcaaaattttcccttttcacaccgccaaccgtcaacgctatcgaaccgattactcccttccccgccgctgcaacctaacaaatcgaccaagatgcgttacgtcctagttaccggcggtgtcatttcaggcgttgggaagggcatcatcgcctcgtccacgggcctgctcctcaaaaccctcggcctgcgcgtcagctgcatcaagattgacccgtatgtgtcggttgatgcggggctcatggcccctgccgagcacggcgaatgcttcgtcttgtgctccggcggcgaggtggacctggatctcggcaactacgagaggtacctctcggtgcggctcaccagtgaccacaacatcacgaccggcaaggtctacctgaacgtcattcagaaggagcgccgcggtgactatctcggcaaaacggtccagatcgttccccatgtgacggattcgatcaaggaatggattaggcgcgtgtctaagattcccgtcgacggctcgaacgaggaacctgacgtgtgcatcatcgagctcggcggcacaattggtgatatcgagagcttgcagatgccgtttattgaggctctcactcaattgcgccacgaggccggcagtggcaacttcatgaacatccacgtctcgtacgttcctacagtccacggggaacaaaagacgaaaccgacacaacacgccgtcaagtcgatccgcagccacggtttgatccccgatatcgtcgcttgccgctgcgagacgccccttgccgagtctaccgtcgcaaagctcgcgctccactgtcaggtcgaggcggaccaagttctcgttgtccgcgatatgccgaccatctaccaggtgcccctgctcttgcgcgagcaggaactcattcggcagctccgggctaagctggcgttggataaactgaccatcacgcccgagatggttgcacaaggagaagctctctgggatttgtggacgtcggtcgttacgcctacgtaccaggaggaggtcaagattgcgcttgtgggcaagtacgtcagatgtcaggacgcgtacctttctgtcgtcaaggcattggaacactcggccatgcgaatccgtcgcaaactcaacctgatgtggattgactcgtcggatctcgagcccacgactgggggcggagcggcacaagccaagtaccacaaggcatggcatgatgtctccacggccgagggcatcatcgtgcccggtgggtttggtcaccgcggcacggaggggatgatgagggtcaccaagtgggctagggagaataacatccctttcctcggtgtttgcctgggcttccaggttgcggcgattcagttcgcgcgtgatttgtgcggcatgcccgaggccacctctgaggagttcgacgcccaggccaaggatctcgtggttgtcaacatgcccgagcttgacaagcagaacatgggtggcacgatgcgtctgggtctgcgcaagaccatcttccagcctggaactgagtggtcgcgcgcgcgggctctgtacggaggtgtcgaggtcattgaagaaagacatcggcatcggtacgagatcaacccgcaactggtcgagacgctcgagaaggcgggccttcactttgtgggcaaggatgagacgggcgaccggatggaggtctttgagctcaaggaccatcccttcttcgtcgggacgcaattccacgccgagtaccagtcgcaagtcgttcacccaagcagaccctacctcggcttcatcgccgcgagcgcgggctgcttggacaaggtgctcaaccagaagccggttgagccattcaagaccgtcgctgtcctcaatgggaccaaatag

SEQ ID NO: 2999 - protein, 1108 aa, Myceliophthora thermophilia
MPGVSGRRSGKRHPKEVSAPTKLAHVPRKRRSALTAPGWALATALIASTAVFLAFNMLAAPFGLSRGPRLPEKALRCNRVFFGDVLPPDATLEKVAVVREGGSYGEGEANVAYSVDPTGLPALCVITVRVRSSSTSSYRLGLFLPDKWNSRFLVVGNGGFAGGINWLDILYNFPVTDPKHLSVADTALIADEVIRQCDLADGVQDGIVSTPDRCAPELTVLLCSGKDNGAKNAPTSGKADCLRPAQLETARNVYSDWTLPPNNELLHPGLTFSSEGEWLLILNGSEPVPYGIGYARDFLFDDDGGGGGGGSGSDAPPWDWRTSFNESVVRYADEHDPGNATADDCAALGAVRERGGKVVIYHGLADGLVPTKGTGVYWNRTLDALGGLGGLGGLEDFMRLFLVPGMGHCYGTAVDAPWNFGGAFQAGLIGSGVWSVPGFEDAEHDALMALVDWVEKGKPLDSIVATTAQETLLVGWAPGNPSAPHPRFLASPLIASRQNFPFSHRQPSTLSNRLLPSPPLQPNKSTKMRYVLVTGGVISGVGKGIIASSTGLLLKTLGLRVSCIKIDPYVSVDAGLMAPAEHGECFVLCSGGEVDLDLGNYERYLSVRLTSDHNITTGKVYLNVIQKERRGDYLGKTVQIVPHVTDSIKEWIRRVSKIPVDGSNEEPDVCIIELGGTIGDIESLQMPFIEALTQLRHEAGSGNFMNIHVSYVPTVHGEQKTKPTQHAVKSIRSHGLIPDIVACRCETPLAESTVAKLALHCQVEADQVLVVRDMPTIYQVPLLLREQELIRQLRAKLALDKLTITPEMVAQGEALWDLWTSVVTPTYQEEVKIALVGKYVRCQDAYLSVVKALEHSAMRIRRKLNLMWIDSSDLEPTTGGGAAQAKYHKAWHDVSTAEGIIVPGGFGHRGTEGMMRVTKWARENNIPFLGVCLGFQVAAIQFARDLCGMPEATSEEFDAQAKDLVVVNMPELDKQNMGGTMRLGLRKTIFQPGTEWSRARALYGGVEVIEERHRHRYEINPQLVETLEKAGLHFVGKDETGDRMEVFELKDHPFFVGTQFHAEYQSQVVHPSRPYLGFIAASAGCLDKVLNQKPVEPFKTVAVLNGTK

SEQ ID NO: 3000 - DNA, 2976 bp, Myceliophthora thermophilia
atggcgtccaatggcagtcaggaggccttcacggtccccaatgtcctggcagctatgctggccatgaggagcggggacaccgagaagaagaaggctgcggtcgaatacctgggacgataccagaaatcaaatgatgcctggacaacgacgatatccatcctgcaaaactcaaccgaagcggaagcgcagctctttgcagcgacgaccctgaagggcaagcccacccccgcccattctcaggcgagcaaacacgaacaagcgctgattggagggcagatcacatatgacctcgggactcaggtttcagaggcagacttgccggcgctgcgcagccagatcctgttgctgctcaagaagtatgcgccgggccctaagccggtgcgggttcagctatgcgtttgcctagcgatcctggccatccagatgcagacatggaaggacgtgttgcccaccgttgtctcgaccctcggaaacgaagtcgagagccacgcctgcatcttggacttcctgcgcgtactcccggaagaggtcaccgagggccgaaagatcaccttgtctgaagaagatctcgcccagaggacatcagagctgctgtccgacaacgccgagcaggttgtgcagttgctcgtcaactatgcgcagtcttcccccgctgccgcgacaaaccctcagcttttcgactgcatcagctcgtggctccgggaagtgcccgttagcgttattgtcaactcgccccttatgaacgccgtccttcacggcatcactgacgacaaatccctgctggctgcggccgactgtctggggatcatctgcagagaaaccaaggatgttgacgacaatttcgacacaatccaggctctgcttcccaaggtgctggagctgaggcctcgcatccaggcgctggtggacgaggaggatatcgagggtttcaaggccatcaccaaggtctttgcggacgctggtgaatcgtgggtgttggtcatcgcccgccagcctcaacacttccgcccgctagtcgagtgcttgctcgagtgttgcgcgagggacaaggagcgggatgtcattggttacaccttctccttctggtacgagctgaagcagtacctgaccctggaccactacatggaggcccgagtgcagctcatcgacgtgtatgccagacttgtcgacatcatgctcaagcagctggagtatccgtactccgacgaccccaacgagctcgacctcttcgacggcgacagggagcaggaggagaagttccgcgagttccgtcaccacatgggcgacacgctcaaagacagctgcgaggtcatgggggttgccgcctgccttaccaaggtacacgacgccatcaagttgtggcaagagaagtacggcagccaggcgacaccaacatcggtgcctcactggcagtcgctagaggcaccccttttcgcgatgcgggcgatgggacgcatggtggagtcgcatgatagcagtgttctgcctcagatattccctctcctggtccagatccccatcagcaacgagaagctgcggttcgctgcaatcatggtctttggccgttacacagaatggacagcggcgcacccggagttcctcgaaccccagttccagtacattgtctcgagctttcagacagactcgcaggagatcctgcgcgctgccgctcaggcgttcatgtacttctgcgtcgactgcaagcagctcctcagctcgcaggtcgttcagctgcaggcgttctatgaccagatcctcgacaagcttcctgtatcgagcaaggaggagatcacagaaggcgtcgcctacgttgtcggtgctcagaagactgaagacgtgtacaaactcctcaagctgtactgtgatccgctcgtgcagcgactgatggccaaggccaacgcggccaccgagaacaaggccaagcttgaccttgctgatcacatcaacctgctcaccttctttgtacaacacgttgtcccgtacctgcccagcaacgcggagaaccctgctgtcaagtactggcaggaggtgtttcccatcttgtcgaccatcctcgacaacttcatcgactttgtccccatctgcgagcgggtctgccgttgctggcggttcatggttatctcgtatcggacagccatcacccctctactcgggccccttgccaacaaactggcagaaggatttacgcagtcgaagcagggctgctttctctgggcgacgagcgccatactacgcgagttttccgaagaccgggaacaagtggaagatggcatcgccgagaacatctacgtattctttgaggcgcaggcgacaagcgtgctccgcaccatgagcgacctgccgcccgtcgaccttccggacgtcatcgaggacttctaccgccttcttatcgacgccctcctctactaccccactaaactcatcccttctcccttgttcacccctatcttccaggccgccatttccgccctggccctggaaaaacaggagccggtctcggcggcgcttcattacatccgcgaccttctcacttacggcgggaccaacccggccggatctgggagcgacctcggaccagcgtccgaacaacttcgccagattgtcaaaaatctccttctcgcccagggcgaagccctcgtgaagcagactctggcaggtatgatgatcacgttccctcgagactgcttcgccgacggcagcggcgtgctgctcggcatgtttgagctgctacccgccgagacaaccacttgggtcgatcgcaccgtccgcatgctgccccagggcaccatcacccccgccgaagccgaccgcctgctcgccaggattagggagaggttgcagggtggcgatccggcgaacctgaggcagattcgggtgctgctgcaggactttacgaatacgtaccgccggaggtatgtggcgccgcgcgatgggctgggccagttggaggctgcacggtttcatttttcgggttga

SEQ ID NO: 3001 - protein, 991 aa, Myceliophthora thermophilia
MASNGSQEAFTVPNVLAAMLAMRSGDTEKKKAAVEYLGRYQKSNDAWTTTISILQNSTEAEAQLFAATTLKGKPTPAHSQASKHEQALIGGQITYDLGTQVSEADLPALRSQILLLLKKYAPGPKPVRVQLCVCLAILAIQMQTWKDVLPTVVSTLGNEVESHACILDFLRVLPEEVTEGRKITLSEEDLAQRTSELLSDNAEQVVQLLVNYAQSSPAAATNPQLFDCISSWLREVPVSVIVNSPLMNAVLHGITDDKSLLAAADCLGIICRETKDVDDNFDTIQALLPKVLELRPRIQALVDEEDIEGFKAITKVFADAGESWVLVIARQPQHFRPLVECLLECCARDKERDVIGYTFSFWYELKQYLTLDHYMEARVQLIDVYARLVDIMLKQLEYPYSDDPNELDLFDGDREQEEKFREFRHHMGDTLKDSCEVMGVAACLTKVHDAIKLWQEKYGSQATPTSVPHWQSLEAPLFAMRAMGRMVESHDSSVLPQIFPLLVQIPISNEKLRFAAIMVFGRYTEWTAAHPEFLEPQFQYIVSSFQTDSQEILRAAAQAFMYFCVDCKQLLSSQVVQLQAFYDQILDKLPVSSKEEITEGVAYVVGAQKTEDVYKLLKLYCDPLVQRLMAKANAATENKAKLDLADHINLLTFFVQHVVPYLPSNAENPAVKYWQEVFPILSTILDNFIDFVPICERVCRCWRFMVISYRTAITPLLGPLANKLAEGFTQSKQGCFLWATSAILREFSEDREQVEDGIAENIYVFFEAQATSVLRTMSDLPPVDLPDVIEDFYRLLIDALLYYPTKLIPSPLFTPIFQAAISALALEKQEPVSAALHYIRDLLTYGGTNPAGSGSDLGPASEQLRQIVKNLLLAQGEALVKQTLAGMMITFPRDCFADGSGVLLGMFELLPAETTTWVDRTVRMLPQGTITPAEADRLLARIRERLQGGDPANLRQIRVLLQDFTNTYRRRYVAPRDGLGQLEAARFHFSG

SEQ ID NO: 3002 - DNA, 342 bp, Myceliophthora thermophilia
atgcgcgcacatcacagcggtcaaaccactgttctggagtcgcttattcaactctggtcaacagtgggcagttacctcatactgcaagttgagaaggaaaaaatcggcttcgtgttcggagatgccgaaagttcccgatgggctggcatacgtcaatccgagaaaatttctcaaggtccgcttttgacaggctctattgggaagcagcaagaagaagaaaacgctgcgtggccacacggagaaagcggtcgagaacaacggaaccccccacgcccccgtttgaacctccccagcttttctcggctcgatcccgagattggcatgcgccaacgaaccagctag

SEQ ID NO: 3003 - protein, 113 aa, Myceliophthora thermophilia
MRAHHSGQTTVLESLIQLWSTVGSYLILQVEKEKIGFVFGDAESSRWAGIRQSEKISQGPLLTGSIGKQQEEENAAWPHGESGREQRNPPRPRLNLPSFSRLDPEIGMRQRTS

SEQ ID NO: 3004 - DNA, 456 bp, Myceliophthora thermophilia
atgcggtatttagtggtaggtgatggatattcttctgccgcaccatcgcaagccacccggcattcttattgctcagattgctctcacccagcagccgaccgtttttgggttccgtcgcacacccgctcccggaccccaccatcggctcgacccctgcccgtgcttctcgatcttgcgcgtggtttcgttgcacaagggagtactacggaagaggtgcctagcatccgggaaacgaaacaaaagaaaaagcattgtactaattgtcatcgaggccacatggctactaccgagctgcgaccgagaaagaactcgggggttcgcttcgcaaccaagaaccgcctccagaaccgcctccctttgggaggagggggtaagggggggttgccgcacctgtttcctcctgtatccgctatttctcctcccccaatttcacaccggtttgccgtggttgtgtga

SEQ ID NO: 3005 - protein, 151 aa, Myceliophthora thermophilia
MRYLVVGDGYSSAAPSQATRHSYCSDCSHPAADRFWVPSHTRSRTPPSARPLPVLLDLARGFVAQGSTTEEVPSIRETKQKKKHCTNCHRGHMATTELRPRKNSGVRFATKNRLQNRLPLGGGGKGGLPHLFPPVSAISPPPISHRFAVVV

SEQ ID NO: 3006 - DNA, 441 bp, Myceliophthora thermophilia
atgtacgcactgcacgagaagctcaagaaggaactcgagtttgtcaaaaccagaatgaagaactactacgacaaatacaggctcgagggacctcgcctagagaggggagacaaagtctacctgattgcacgaaacctgcgaaccaaacgaccaagcacgaagctggacttcaagaaggtcggaccctttgttatcaaagaacgaatttcgacatctaactaccgactatcgttaccgtcatctatgcgactacggacagatgtttttcatatttcacttcttgaaccagcaccaaagaacgccaaggttgctatgcacatcgaagcagaggacgaagaggaagaatgggacgtcaaagaaattctagattcacgtattattaacggggaactgcagtacctggtcaaatggcttgattttggaccagaagacaactcatag

SEQ ID NO: 3007 - protein, 146 aa, Myceliophthora thermophilia
MYALHEKLKKELEFVKTRMKNYYDKYRLEGPRLERGDKVYLIARNLRTKRPSTKLDFKKVGPFVIKERISTSNYRLSLPSSMRLRTDVFHISLLEPAPKNAKVAMHIEAEDEEEEWDVKEILDSRIINGELQYLVKWLDFGPEDNS

SEQ ID NO: 3008 - DNA, 6429 bp, Myceliophthora thermophilia
atggccccaagcgctctcatctcaaaagcgccgggattgggccacccctacgcacttggcgagcgagggacggcttctcgacaagtcatggcattgggagagggccacacaatgctgtcgaacggtgcgttgcagcacgcgttagggacagactcgagtcacgcctccaccagccaccggtcgagcatcgccaacatggtgctcaccctgaagcagttcagcggaaacgtgcttggctcgagcgtgtcctctcagctcctcaacgccacatatgactcgatccgtaactggatcaagaatcagaggatgacccacctgcccccggagggcagcgactacgacaaggtgctggcctgggcccagctctttatcgagcgtcttcactcgttcgacacggccatcagggagcttgacagacaaagcaccatggccgcccaggtagcatatggttactgtttcatcttgctcgagctaggcaaggaaaactcccaggccctcatgagggcgttccgatttttctacaccatatctatgcctatggtcaacctcctggagcgtactgagctcttcaacgtatcgaaggaaatccaggagcagctcatcctcgccctgtcggatctggtaggtttggtcggcagcgtagcgacgcattttcgcaatactatcgaggatgctataagcaagcccgatgcttcaagcaagctcgatacttcaagcacgcccatctcttctttcaaccttcatagcactttctcggaacaaattagaacgtttagggtacgctgcgagagaataggcgagatcatgtggcgatatcagctggtaatggcaaagttggatgccgaagccgtttcggatgccgagctggtcaaacgttggcttgctcctgaggatcgcgttctaaccagcgtcgccgacagacgttcattgttggctcatgaccgagaggaactaacctgtctttggatcgctccccatctgaccaggtttctgaaaggcgagaataagatcctatccatcagcggcaggccggggtccggaaagagcgttctatcctccgtcatagtggagtaccttcagcggcccatattgggcgttaactatgacgcgttgtacatccctataagcaagaggattcccgtcgaagcctcggctcgggctgtcgccaaaagcgttctgggtcagctgtttgagaagcgcattggcaacgtcaagctcctccagatactctgcgatgcccatgaccagagtaagcacgcctccacgtatgaggaatacgaccaaatcatgtggatggccgtggagcgggcactcgcgacggctctgcccggcgcccgagagctcgttctggtcgttagtgggattgatgaggcctcatgcgacgaagccgccttgtttgggcggctcgcaaaggccacggcaaatggcaccaatgtgcggctcattaccctcggccgggaggcgcactcgccggccgacggtctcatgagcatccatatgagtgaggatctgatcttagacgacatcatggccgtcatccggaacgacttcgacgtggacagcgaattttcgcaaatgtccgaattcgagcaagagtctatcgtaacgcggctcgccgagtcttcgactggctcgttcatctgggcgaagctggccaccaagcgcttgcgtcgcgcagtcggcctcgaaaagttgcgcgaggctattgaggaagtggtcacgaaaaagccgaccatcaaggatttcgtcattcgcgaggtccggtcccccaatgtgagagacgaggcgaggcatatgctcgtgtggcttgccatcgcaaatcgtccgctgtcgctgaaggagctcgcgatcctggctcaaatcgacgtcggcaacggtaccatctcgaaccggcacatcgatgtgctgtcgacgatgaagcatgtccaggggcttgtgttcgtccaagacggtctgatgtacctccggcacggactggtccgcgccgccctcctggacatgatcgccaaggcagagctggcccctgagatcacggacgcgcagggagacctcgtcgcccgtctgctgctgtacatcaaggcgaaggtgccggaacagcacaagccgtccgtcaccgtcttgaacagccatgagacgggccagttgctcgacaacaaccccctgctggacttagccgtgctctactggcccatccacctcaccaagacacaagacttcaggagcggcggcaaggaaggggcggctaaggcgttctcccgcgtgttccctacgaccatcacggccttgctcctccaggccagcctatgggaacaccgccctacaccggccctgctcgagtaccagaacaccatcacggacatctaccgccagctctaccgggaaaagagcgccttgaccctgcagctcctgatcttccaggcggtcctccaccgtcaggttgggaagatagatcaggcggcttccctcttcttcgaggttgtcttgaccggcaacgagtttctcggcccgggccataccgtcaccatccagatggccaacagctacctcgaggtgaccgagtccaagcgtaccagctttgtgaccgggattatggacaagcgagagcaggtcctactcgtcctggtagagggctacaaggtgcagttcggcgagacctcgacccaggctgtctccattctgcggcagctagagcaacattaccgctccgttcaccaagaacaaaaggcccaagagatcaagacaaaaattgacaggtcaacggaccgcaagaagcccgagggcggagactatgtgaatcccgacaatggtcgagttcacctgtaccatatctggtcaacccctcacgaggacggccaggcgctgcgtcttgaattcgaagaacgtgacgagcttcttctcggcgagtccaagtcgtacaacttcggcgacctccttgaaaaggccgagaaatatgccgccaatggtgatgccgaatcggccgagcagacctacttcacgctgtggcggtgggcgagtgaggaataccgggtgcaatactcggaagtctgggtcgagaggaacctgcaaaccctgctcagctactccaagttcctgcacagtcagcatcggacgtccgaggccaaggggatccttgtgggcgtctggaaggagtacggttcgtccaagggctggagcatcaccgagacgtctgcgtcgctcctggtccagatcgcccaagtgatgaagtctgtcgacttgtcttttgcggcactgtccctgttccagcagtgcgagcactactaccgcgcaacgaggcgcacagagacgtcgacctacagagagcttcagaagagcatcgagaccacctcgcgcgaggtgctgaagtgggttagctcgtcagagagcgtatattccgaattcacgttggagcagactgtgctcgagtcgcttggcttttccaggagcgagactcagttgacgctctcggcgacaaacagcctggtctcactctacatttcccagcaccgctggcacgatgcctctcgtctcctcaagacggtgctacgcaggatttggccgtcgttgttctcggcacatgcgcaagaagtcaagctgccccgggagagcatcaagctgtgtctggacctcgccgggcgcctggcggattgctaccacgtgcgccgcctctggggccacgaggagaacatccgggtgcgcgtctactgtgtcttgagggcgagcggcagagtcgacgacaagttgcgggagcgtgccacgaccgacctggtcgtcttctaccgccgcgcgtcccagaccgagtcgctcatcgccctgcgccaggagatcctggaggactacacgaccttttacggcgaacagcacccggccgtcatcaagaccctgtgggagctggcggaccttgcacgccctcggccagtctttgtcgagtattaccgcaagatcgtccgcgcccttaacaaggaagccgagattagcactccggaggccctgccggccgtcattgtggtcgccagggagctgtggagcaggggcatgttctccgacgccctgccctactacaggacgctgttcgccaccttcctcaagacccccaagacgagccccaagttccaggaccaggagtgggtgctcgggtgcttctcccagtacaccgactgcctgcgcagcctgcgggtgagcttcagtgtcctcgaagaggtcacgtctcagttcctggcgcagtgtaaggccctatacggtgccaaggctaccatcaccgtgcaggtcactctgatcctggccaggctgtaccaggagtccaggtcgcacgagcagaaggccattgcgctgtacgaagagctcctccaactgggatccgagcatatcaaccgcgaagagatatcggccgacctgaaagtgctgcatgacgcccaagtgaacgccatcaagtcgtcagagacccggagcgaggttacgtcgtcgcaactagaccgccactcgacggtcctgcgtgagcgaatcgtgtctgtccgccagaagtacggctgggctcacggggagaccctctccacgttgacggagctggtgcacacctacagcagacagggaaagaccgaggcgttggtgagtgagctcgagcaggctgtcgtgaacatcatggcgaccgagacgtcctcgacgcggctcgtcgaggcggcctcgacgatcgcctcgcactacatggccgtcaaccaagtacagaaggctacagagctcgtcgaccaggtgtactctcagatcctgatcaaagagacggccgatgtcaagaagacgagtcaggtcaacctatcgtcccgcggccgcgagagcttgatcttcttggcccagttcgagcacagcctccgtcgcagctcggccacgctgaccgagatcctggccgacctgacgacccagtacatcgagtttgaaaagttccgctctctcatctcgtccagcagcagctttttggatgtctccgcatcctctgcgcgcctttaccactccctgctggtttctggccgggacttcgcggccgcgtacgtcttctcacgcttcactcagtggttcaacgacacggaggccaagcgcctcaacctcatggccaatcttagcaccacccaggtccaggccttcctgcacagcctcctcgaccacctcgggacgcacaagtccagagacatagtccgaaccgtcggcatcatcggcaacacccaggtcctccggttgcggaaaaacggccggttccaggatgcctgcgacctggcggttgcctgtttccactacatcgcggcccgcaagaaataccgcaccaccacgatggccaagctggtgctgaccatgggcatggcattaggggggcgagagccgggtgctgcggcgccgtctgctaagctcaacgccgaaagcagcagactgctgctcgagacgtcgcggaccatccttcagagtgcactgcaggtcctgatcgacctgaatgtcaacttggccaagctcggcattgtgcacctgaaccagctgatcggccttctcggcgagcagcagaactggcatgccctcgtttccctcatggccaggctctggagcagccgcgagacgcagcaggagtggccgccctcggtcacctttgccctgctccgccgctacattttggcccgctggctcgacggagactccaggggcgccctgcgcgcgaccgagcatattgtgtacaactgccggcgcgtcctcggcctgcgcgaccccatcacgcttgacatgtcggtcctgctgagccagctgtacacggaaatcgggcagcgctaccagaaccagccgcacgcgagaggtgacgagaacggtgccgccatggccaaccgctactaccgcaaggccgccgcgatccacgagaacatcctgcgcgtctatagcgacccggcctatgccagcatggacgacgtcgccctcgtgactcacaccaacgggtacggcggcgcggtcagtcccagcggtgacggcgacgtgagccctaccctccagttcgacctcgaccgcctcctggcccatggacagcatctgcaccgcgcacagcccgacgccggccaggtggtccggcaacacctgcgtctactcaagctcgcgatccagcgcctgggctcctggcccaaggattacgccgagtacgaacggctcagcaccgacgtgttccgtgaatacggcgccgacctgcggggtgtcgaaggcgtcgagagatgggacctcagggcacatggccgaggcagggccgaggcggacgatgatctggtgcagccaaagagctacgctgacgattgggagttgccggatgcaagcaatggccacaattcacaaggccagcacaatggacagcaagaggacgtggaaattcatgccccaccaacacgcaaggccgcgatgggcctacaggactccaactaa

SEQ ID NO: 3009 - protein, 2142 aa, Myceliophthora thermophilia
MAPSALISKAPGLGHPYALGERGTASRQVMALGEGHTMLSNGALQHALGTDSSHASTSHRSSIANMVLTLKQFSGNVLGSSVSSQLLNATYDSIRNWIKNQRMTHLPPEGSDYDKVLAWAQLFIERLHSFDTAIRELDRQSTMAAQVAYGYCFILLELGKENSQALMRAFRFFYTISMPMVNLLERTELFNVSKEIQEQLILALSDLVGLVGSVATHFRNTIEDAISKPDASSKLDTSSTPISSFNLHSTFSEQIRTFRVRCERIGEIMWRYQLVMAKLDAEAVSDAELVKRWLAPEDRVLTSVADRRSLLAHDREELTCLWIAPHLTRFLKGENKILSISGRPGSGKSVLSSVIVEYLQRPILGVNYDALYIPISKRIPVEASARAVAKSVLGQLFEKRIGNVKLLQILCDAHDQSKHASTYEEYDQIMWMAVERALATALPGARELVLVVSGIDEASCDEAALFGRLAKATANGTNVRLITLGREAHSPADGLMSIHMSEDLILDDIMAVIRNDFDVDSEFSQMSEFEQESIVTRLAESSTGSFIWAKLATKRLRRAVGLEKLREAIEEVVTKKPTIKDFVIREVRSPNVRDEARHMLVWLAIANRPLSLKELAILAQIDVGNGTISNRHIDVLSTMKHVQGLVFVQDGLMYLRHGLVRAALLDMIAKAELAPEITDAQGDLVARLLLYIKAKVPEQHKPSVTVLNSHETGQLLDNNPLLDLAVLYWPIHLTKTQDFRSGGKEGAAKAFSRVFPTTITALLLQASLWEHRPTPALLEYQNTITDIYRQLYREKSALTLQLLIFQAVLHRQVGKIDQAASLFFEVVLTGNEFLGPGHTVTIQMANSYLEVTESKRTSFVTGIMDKREQVLLVLVEGYKVQFGETSTQAVSILRQLEQHYRSVHQEQKAQEIKTKIDRSTDRKKPEGGDYVNPDNGRVHLYHIWSTPHEDGQALRLEFEERDELLLGESKSYNFGDLLEKAEKYAANGDAESAEQTYFTLWRWASEEYRVQYSEVWVERNLQTLLSYSKFLHSQHRTSEAKGILVGVWKEYGSSKGWSITETSASLLVQIAQVMKSVDLSFAALSLFQQCEHYYRATRRTETSTYRELQKSIETTSREVLKWVSSSESVYSEFTLEQTVLESLGFSRSETQLTLSATNSLVSLYISQHRWHDASRLLKTVLRRIWPSLFSAHAQEVKLPRESIKLCLDLAGRLADCYHVRRLWGHEENIRVRVYCVLRASGRVDDKLRERATTDLVVFYRRASQTESLIALRQEILEDYTTFYGEQHPAVIKTLWELADLARPRPVFVEYYRKIVRALNKEAEISTPEALPAVIVVARELWSRGMFSDALPYYRTLFATFLKTPKTSPKFQDQEWVLGCFSQYTDCLRSLRVSFSVLEEVTSQFLAQCKALYGAKATITVQVTLILARLYQESRSHEQKAIALYEELLQLGSEHINREEISADLKVLHDAQVNAIKSSETRSEVTSSQLDRHSTVLRERIVSVRQKYGWAHGETLSTLTELVHTYSRQGKTEALVSELEQAVVNIMATETSSTRLVEAASTIASHYMAVNQVQKATELVDQVYSQILIKETADVKKTSQVNLSSRGRESLIFLAQFEHSLRRSSATLTEILADLTTQYIEFEKFRSLISSSSSFLDVSASSARLYHSLLVSGRDFAAAYVFSRFTQWFNDTEAKRLNLMANLSTTQVQAFLHSLLDHLGTHKSRDIVRTVGIIGNTQVLRLRKNGRFQDACDLAVACFHYIAARKKYRTTTMAKLVLTMGMALGGREPGAAAPSAKLNAESSRLLLETSRTILQSALQVLIDLNVNLAKLGIVHLNQLIGLLGEQQNWHALVSLMARLWSSRETQQEWPPSVTFALLRRYILARWLDGDSRGALRATEHIVYNCRRVLGLRDPITLDMSVLLSQLYTEIGQRYQNQPHARGDENGAAMANRYYRKAAAIHENILRVYSDPAYASMDDVALVTHTNGYGGAVSPSGDGDVSPTLQFDLDRLLAHGQHLHRAQPDAGQVVRQHLRLLKLAIQRLGSWPKDYAEYERLSTDVFREYGADLRGVEGVERWDLRAHGRGRAEADDDLVQPKSYADDWELPDASNGHNSQGQHNGQQEDVEIHAPPTRKAAMGLQDSN

SEQ ID NO: 3010 - DNA, 1452 bp, Myceliophthora thermophilia
atgcggcagaccaatttggaatccaggaacaaggtgttccttggctcctttgtgcacagcaaggtgctcgacgagctcgagtacctgcaccaaacggctgtctttgtcgacaagtccggaacgattgtcgccatcgagaaggactgcgatgagtccaaagcaagggagacggtactccctcgattggggtgggcggaggcagatgtggaggttgtgaaggctaaagagggacagttcttcttccctgggtttatcgacacgcacatccacgctccgcaataccccaacgccgggatattcggcagctctacactgcttcaatggctcaagacgtacacctttccgatggaggcctccctttcggaggcggccaaagcccgccgggtctacacgcgcgtcatccgcaagactctctcccacggcaccacctgcgcggcctactacgcgactattgacgtctcctcgaccaatctcctcgccgacctctgcatgggatttggccagcgcgccctcatcggccgcgtctgcatggactcggagctctctccggactactaccgcgacgcctcccccgaggcctccatcgccgccaccaaggccaccatcgcgcacatccgcagcatcgacccagccttttcgctcatccggcccgtaatcacgcctcgcttcgcgcccgcctgcaccctccccctcttgcggcagctcggggccctggcagaggagacggccctgccggtgcagacgcacatatccgagaacaagccggaaatcgcgctggtgcaggagctcttcccgcggtcgctgacgggcgcggcggacggctcgtacgcggccgtctacgacgcggcgggcctgctcacgccgcggacggtgctcgcgcacgcggttcacctgacggagggcgaggcggacctggtggcggcgcggggcgccaaggtcagccactgcccgtgcagcaactcggcgctgacgagcggcgcggcccccgtccgccggctgctgctcgaccgcggcatcgtctgcggcctgggcaccgacgtcagcggcggctacagcgccagcgtgctcgaggcggcgaggcaggccgccctcgtcagccgccacgtcgcgttcgggccgggcgggcaggagcgggacaagctcggcgtcgaggaggtcctcttcctcgccaccaggggcggggccgaggcggtcgggctcggggacaaggtcggcgggttcgaggtcgggatggagtgggacgcgcagctgatcgggctgggcgccatccgggaggacggggaagaggaggaggtggatgatgaagagggcggcggcggcggcgccgggaacgtggacgtgtttggctgggagagctggcccgagagggtggccaagtgggtgtacgctggagacgaccgcaacaccatcaaggtgtgggtcaaggggcggttggtacatcagcgaaagtaa

SEQ ID NO: 3011 - protein, 483 aa, Myceliophthora thermophilia
MRQTNLESRNKVFLGSFVHSKVLDELEYLHQTAVFVDKSGTIVAIEKDCDESKARETVLPRLGWAEADVEVVKAKEGQFFFPGFIDTHIHAPQYPNAGIFGSSTLLQWLKTYTFPMEASLSEAAKARRVYTRVIRKTLSHGTTCAAYYATIDVSSTNLLADLCMGFGQRALIGRVCMDSELSPDYYRDASPEASIAATKATIAHIRSIDPAFSLIRPVITPRFAPACTLPLLRQLGALAEETALPVQTHISENKPEIALVQELFPRSLTGAADGSYAAVYDAAGLLTPRTVLAHAVHLTEGEADLVAARGAKVSHCPCSNSALTSGAAPVRRLLLDRGIVCGLGTDVSGGYSASVLEAARQAALVSRHVAFGPGGQERDKLGVEEVLFLATRGGAEAVGLGDKVGGFEVGMEWDAQLIGLGAIREDGEEEEVDDEEGGGGGAGNVDVFGWESWPERVAKWVYAGDDRNTIKVWVKGRLVHQRK

SEQ ID NO: 3012 - DNA, 5625 bp, Myceliophthora thermophilia
atggcctcgaccatgggcatgagtttggacaaccgccgagcccggcttcatcagcttgctgccgaatggggtatccacccattgccgccggtggccccgccgtctccggccccacagtcccggacaccgaacgacgagttccacgccgaagagctgcttaaaagacggcgcatgtcggtaatccaagaaaagccatcccaaggcaccctcaaacgagctttcagctccaacagaaaaacatgggagccgagcgaaatcttcgaggcgctcaatgcccacgtagccaatggcggagcaccgggcgtcgccgacgcgctcatcgcgaagctgttgtcggtcggcggtaaccttaacgtggcgaatggcaagagcaaaaccaacctgctcaccaggcgaaggagcacagaaaatatggaacgcagcagagtgctgcaaaaggccgtcgagaatcgccaggccgacatggttgctgtcctggcccagcacgcagaccctctcactcttgatcgggcactgcccctggcactacgagcgggtgacctcgccatggtccacctattgctcagcaggggtgcaaacgtgtcacagacacaggatgccctggacgcattccgccagatatgcatcatgggcgggaacgccgacctagtcgggttggttctccagtccgaggggcctccaccgccgagctggctctcaatgtgcatggtcgatgctgctcggaaggggtgtcttcagaccgttctaaggctgagccggtcttccgccgactgcgaatacaacaaggccgaagccctgagagctgcgacagcccagtgcagggtagacatcgcactcgccattctcacagcagcaaagcccccaaccaccggaggccaaggcattctggagagctttggtctgcttcttcagcacgccaccgtcggtccaaacgagaaactggccctcacagaagctctgctgtgcgctggagcctcaggcgatcctgtctcagtgctgctttcgcaggcttgcgcaaacgagttccacgacatgatcactcttctcgtctcgtacggagcctccgtcgagttccaagatgccagcattgtgcgtaacgctgtttcgaggggacaaagcactcttgtgcacttgctgctgggagactcgaccatcctcaatccgatctacgcatcgcagtgcgtcacgagtatccccaaagcaatagcgccagaagaccgctatgccatactcagcctgctcttgaagaagggtgctgcaggaacaccgttgcacgatgctctggtcgacgccgtcaaggccggcgatctgccatccgtacagctcttaacaacaccccaatttccgagcccccggccgtcgacgaatccaaaccgccgcagcagccttcccggaatggtatacattcgacacgagatggcttcggtggaccacaagagcggtcttgcactcgacatcgcagtgcaaacggggaacctgccgatggtaaagcagcttttggccggcaagccgtccaccaagacgctcgaccaggtgttttcctcggctctaaaactcgaacccgccgtccgttacgatatcgtggaatgcttcctcaccgccggtgtctcgcgtgcaagcgtttctgcggcactgcagcaggctgtcgaggaacaacccccacatcgggacgagaatctaattagcgtcttgctgcgacatgatgttgatgtcaactttaacgacggcgctgggatcctcgcagcaatcaccatccgagacctgccattgcttgaaacactgctcaaaagcaaacccgcgccccaaaccatggccgccgctgttgctcgtgccatggtagtggaggagaagcccgtccgctatgaaatgatgagaatgctcatcggtgctggagcgggtcgggccgggaccgaggtatccgaggcactcacacaactcctacctgtcaagccaacggacatgcagctagcaaccttgctgctcgagctgggaagagcagacgcaaacttcaatcaaggcctccccctctccatagctgtgaccgacggcgatcccgccttgctcgacctcatcctccgccacggccggcccaatcccgacagcatctaccgcggcctcgagctcgtcgccggcctctccacggacccttccaaacctgccaagcttgccgcactcctccgctacagacccactcccgagttcctcaacgcgattctcttcaaggaagtccaaaccctgctcgccctcccgcccgcctcccgctcccttacctccctccgcgccctgctggccgcaggcgccgatgtcaacgcccacaaagccgctgctctctgctgcgcggtcaaggccgccgacgcccccatagtcgacctgctcttcggcggcggcggcggcggtggcggcgcttccctgaccgcccgaccatctccggcctcgctggccgccgccctcccgcagagcctcaacatctccgacccaatggaccgactcgccttcacacagcgcctgatccgcgccggcgcgccacccgccgaggcaaccagggcgctgatctacgccatcaccgcgcacccggctgacctgccgctgattacgctcttggccgggcacgcagaccatcagtccctcccctccgggaagaagcaaggaggagcattgctggtggcggtcgagggaggcaatgtcgaggctgtcgaggtcgtgctcgagaagggcgccgggcggtacgggaaggccgtcctgggggcagcgctgagggaggcggtgagcgcgcaggtcgttccggacgggaacaagagggtggggatcaccaaggcgctgcttaagcgcggggtggacgcgggagcgctgggggatgcgttgcttgtcgcggcgagggagggggatctggagctagggaggctcctggtggagcacggtgcgagtgtcgagcatcgcgagggccaggccatcgtcgaagcctgttccgggggctcggccgaggtgctgaagatgctgttgggtggcaagggcgaggtgaagatggtaactctgatcaaggggttccaggcggcggcggcgcaggtcggggacctcggcaaaagagcagatgttttccggctgctgctcgacaagggggtggcgggagaggttgttgacgcgcagctggtgtctgctgccaagtgcgggattgagggcgagaggctggttcgcctcttgctcgagttcggcgcgagtgtcgactacgatgccggcgaggccatctggaacgcaactcgcagtgccatcctggggagtctcaagttgatgctcggcgtcgagaaggtgggagagcggcagaagacgccatcccagacaacgctgctcaggtctctcaaggctagcaagaaactcggcagtgacctgcgataccaggtcatccagtggctcttccaagcggggctcacgccctgcgaggagatcaacatcgccttgaacagggcagttaaggacgaacccgattcccggcttgttcggcttctgctcgaacacggagcatctccgttggccaacggctgcgaaaccttgatagacgccgcccagttgctgttggacgatatcttgtccatcctcctagaggctgacataccggccaaggatgcgtcatgggcattccagcaggctttcactccggggacggccacgacgtggctcacggagaaaggtcttcatgttgcgaagatgctcctgcataagggcgcagaaggagagtgccttgctgtggctctaagcaccgcgattgacgcctacggatcagacattgacgcggtagcacgcggatttgctcaggcattgctacagttcaatgtcgatgtcagtcacgagcacgggctggttctccagaaggcggcccagaaggcggactcggaattgatccagcagatcctacagcaaagaccggattcgatcgcggtctcgatggcgtttccatacatcttcgacgcggacctttcggaatctgaaactctccatctcattgagctgtttgtgaactactatgaagggggggagaggctcgatgttatgtttgtccatcccgtatccgagccgatcctgttccgggcgctgaacaagtttcctcgctcggtgagaatcctcaagacactgctcgacgccggctattatcatgaccaaacaacggtcatgcgggtcatggatgatgtcgaggagccagagcaagtgagcctcctattttggtctctttcgcagcctcagaagaaagtcagcagcgcggtcatcgagctgctgatcgactctggcgccaaggtcgattttgagacccgcgtgaccaagacgacaccgctcacggtcgcgattcagaaccgccggcacgacttggtaaagagccttgttcttgccggagccgaggttgatgtggtcgacgcaaccggcaacacgccgatgacgctggccacccggatcggcggtgatctcggcatctctctcatgtcgagcatcctcgccgccgacccgtcgatcaatgacgggtcattgcacaatgcggcccgagacctcaacctgaaggccatgcaggtgctcgtagagcacggtcacgacgttgacttcccaagcaccctgcacggcggccgtagtgcgctgggcgagctgtgcctgaacgccgcccacgccggcccactgacggctgcccaggaaaagcagatggagaaagccatggcattcctcatcagcaaggactcagacctcacgattcagtcggatggcaaatccgttctcctcctcgccctccactcgaccgaccccatccccaccacgcgcgcgctgctcaaggtaggcctgtggaaacacgtcaacaagccgtacaaccactacaccgacgggacctacacttactcggccacgcaatacgtcgcccgcgtgctcccctgctccgacgatctccgaccacagctcctccagctccttaaggccaaccgcgccatcgacgtgtactacgccaacgacgggccgcagcccaaggacgcagtgaacctgccgcccgagctcctccgcgccgagcgcgaacgccgcgcgcgagaagagcgcatcgccaaagaaaacgaggaacacgcgatagcgctggcgcgcacaaaggagattgcccagattcagaaccagatcttcgtggcccgcgcggagctcgaagacgcccgcgcccgcaggaagcgggaggacgagatggcggcgctgcgggagaggcaggcggccgaagaggcggcgttcgcggccgagctgcagcgccggaaggcggcgcgcgaagcggccatcgcgcacgagcagcggctcaccgaggccggcctcacccgggcgaggctggtggcggatgcggagctggagatggaggggaagaagcgggagatgatgatcaagtgggagagggacatgtcgcgacagaaggagaacgacgccaaggcgctgagcagcatcaggatcaaggagagggaggcgatcgagcgcctggatgccgcggccgatgagagagcgaccaggaggatcgcggagcagaggaggttggtggaggggcagaccgcgctggcggcgaggctggcgaacggggcgggcgggctggataggaggcagattggctatgttaccggggagctggactaa

SEQ ID NO: 3013 - protein, 1874 aa, Myceliophthora thermophilia
MASTMGMSLDNRRARLHQLAAEWGIHPLPPVAPPSPAPQSRTPNDEFHAEELLKRRRMSVIQEKPSQGTLKRAFSSNRKTWEPSEIFEALNAHVANGGAPGVADALIAKLLSVGGNLNVANGKSKTNLLTRRRSTENMERSRVLQKAVENRQADMVAVLAQHADPLTLDRALPLALRAGDLAMVHLLLSRGANVSQTQDALDAFRQICIMGGNADLVGLVLQSEGPPPPSWLSMCMVDAARKGCLQTVLRLSRSSADCEYNKAEALRAATAQCRVDIALAILTAAKPPTTGGQGILESFGLLLQHATVGPNEKLALTEALLCAGASGDPVSVLLSQACANEFHDMITLLVSYGASVEFQDASIVRNAVSRGQSTLVHLLLGDSTILNPIYASQCVTSIPKAIAPEDRYAILSLLLKKGAAGTPLHDALVDAVKAGDLPSVQLLTTPQFPSPRPSTNPNRRSSLPGMVYIRHEMASVDHKSGLALDIAVQTGNLPMVKQLLAGKPSTKTLDQVFSSALKLEPAVRYDIVECFLTAGVSRASVSAALQQAVEEQPPHRDENLISVLLRHDVDVNFNDGAGILAAITIRDLPLLETLLKSKPAPQTMAAAVARAMVVEEKPVRYEMMRMLIGAGAGRAGTEVSEALTQLLPVKPTDMQLATLLLELGRADANFNQGLPLSIAVTDGDPALLDLILRHGRPNPDSIYRGLELVAGLSTDPSKPAKLAALLRYRPTPEFLNAILFKEVQTLLALPPASRSLTSLRALLAAGADVNAHKAAALCCAVKAADAPIVDLLFGGGGGGGGASLTARPSPASLAAALPQSLNISDPMDRLAFTQRLIRAGAPPAEATRALIYAITAHPADLPLITLLAGHADHQSLPSGKKQGGALLVAVEGGNVEAVEVVLEKGAGRYGKAVLGAALREAVSAQVVPDGNKRVGITKALLKRGVDAGALGDALLVAAREGDLELGRLLVEHGASVEHREGQAIVEACSGGSAEVLKMLLGGKGEVKMVTLIKGFQAAAAQVGDLGKRADVFRLLLDKGVAGEVVDAQLVSAAKCGIEGERLVRLLLEFGASVDYDAGEAIWNATRSAILGSLKLMLGVEKVGERQKTPSQTTLLRSLKASKKLGSDLRYQVIQWLFQAGLTPCEEINIALNRAVKDEPDSRLVRLLLEHGASPLANGCETLIDAAQLLLDDILSILLEADIPAKDASWAFQQAFTPGTATTWLTEKGLHVAKMLLHKGAEGECLAVALSTAIDAYGSDIDAVARGFAQALLQFNVDVSHEHGLVLQKAAQKADSELIQQILQQRPDSIAVSMAFPYIFDADLSESETLHLIELFVNYYEGGERLDVMFVHPVSEPILFRALNKFPRSVRILKTLLDAGYYHDQTTVMRVMDDVEEPEQVSLLFWSLSQPQKKVSSAVIELLIDSGAKVDFETRVTKTTPLTVAIQNRRHDLVKSLVLAGAEVDVVDATGNTPMTLATRIGGDLGISLMSSILAADPSINDGSLHNAARDLNLKAMQVLVEHGHDVDFPSTLHGGRSALGELCLNAAHAGPLTAAQEKQMEKAMAFLISKDSDLTIQSDGKSVLLLALHSTDPIPTTRALLKVGLWKHVNKPYNHYTDGTYTYSATQYVARVLPCSDDLRPQLLQLLKANRAIDVYYANDGPQPKDAVNLPPELLRAERERRAREERIAKENEEHAIALARTKEIAQIQNQIFVARAELEDARARRKREDEMAALRERQAAEEAAFAAELQRRKAAREAAIAHEQRLTEAGLTRARLVADAELEMEGKKREMMIKWERDMSRQKENDAKALSSIRIKEREAIERLDAAADERATRRIAEQRRLVEGQTALAARLANGAGGLDRRQIGYVTGELD

SEQ ID NO: 3014 - DNA, 1677 bp, Myceliophthora thermophilia
atggcggaaagaccgggcgtcttacggcgcttggccaacaaggtggccgtcgactccgaaccgggcctcaccagcgcccagatgatgttgacaaaccatgacctcaagcccgtcgagccggaacgccgccaatggggaccctggaactttgtcggcttctgggttgccgactcgttcaacatcaacacctggatgatctcgtcgtccatgattgtgggcggcctgtcgtggtggcagtcgtggctctgcgtctggatcggctattccatctcgggctccttcatctgcatgaccgcccggatcggcgccacctaccacatcggcttccccgtcgcgagccgttcgtcgtttggcatctggggtagtctgtggcccgtcttcaaccgagcggccatggcgtgtatctggtatggcgtgcagtcgtacattggaggacactgcgtgtatctaatgatacggtctatctggaagagctgggaccgcgaaaccatccccaacacgttctcccaggactcgggcacctcgacggccgattacgtctccttcttcctcttctggttctgctcgcttccggccatctggttcccggtccacaagatccggcacctcttcaccgtcaaggcctatgttgttccctgcgcgggcattgcctttctcatctggtccgtcgtccgcgccggcggcgtcggccccatcgtccggcagccggccaccaaggagggcggcgagctggcctgggagttcatcaagggcgtcatgagctccatcgccaactttgcgaccctcattgtcaactcgcccgacttctcgcgtttcgcgggcaagccgcgcgacgcgctgtggtcgcagctcttcaccatccccatcggcttcgccctcacctccttcatcggcatcatcgtctcgtcctcgtcagccgtcatctacggcggcaagcccatctgggacccgctcgacctgctcgagcacttcctcgacgacggcggctcggcccagcgcttcggtgtcttcgtcatcgccgccgccttcgccctcgcccagctcggcaccaacatcgccgccaactcggtctcggccggcaccgacatgacggccctgctgccgcgctacatcaacatccgccgcggcggctacatctgcgcggccatcggcctcgccatgtgcccctacaacctgctgacctcaagcaacatgttcaccacctacctgtccgcctacagcgtcttcctgtcctccatcgccggcgtcatgatcgccgactactacctcgtccgccgcggcttcctcgaggtcaaggagctgtacgacgcccgccggacggggccctacttctacacggccggcatccactggcgcgcctacgccgcctacatcgccggcatcctcatcaacgtcgtcggcttcgccggcgccgtcggcacccccgtccccatcggtgccacatacctgtacaacctcaacttcttctgcggcttcggcgtctccgccgccgtctactggctgctctgccgcatctggcccgtccccgccaccagcgaccgctggatggaggtcggcgacgagatcggcgacctgcgcgtcgcctaccacgatcggaggagcagcagcctggtcggggtcgaggaggaggaagtggagagcgggagcgcggccaaggacgcggggaaggcggtatag

SEQ ID NO: 3015 - protein, 558 aa, Myceliophthora thermophilia
MAERPGVLRRLANKVAVDSEPGLTSAQMMLTNHDLKPVEPERRQWGPWNFVGFWVADSFNINTWMISSSMIVGGLSWWQSWLCVWIGYSISGSFICMTARIGATYHIGFPVASRSSFGIWGSLWPVFNRAAMACIWYGVQSYIGGHCVYLMIRSIWKSWDRETIPNTFSQDSGTSTADYVSFFLFWFCSLPAIWFPVHKIRHLFTVKAYVVPCAGIAFLIWSVVRAGGVGPIVRQPATKEGGELAWEFIKGVMSSIANFATLIVNSPDFSRFAGKPRDALWSQLFTIPIGFALTSFIGIIVSSSSAVIYGGKPIWDPLDLLEHFLDDGGSAQRFGVFVIAAAFALAQLGTNIAANSVSAGTDMTALLPRYINIRRGGYICAAIGLAMCPYNLLTSSNMFTTYLSAYSVFLSSIAGVMIADYYLVRRGFLEVKELYDARRTGPYFYTAGIHWRAYAAYIAGILINVVGFAGAVGTPVPIGATYLYNLNFFCGFGVSAAVYWLLCRIWPVPATSDRWMEVGDEIGDLRVAYHDRRSSSLVGVEEEEVESGSAAKDAGKAV

SEQ ID NO: 3016 - DNA, 255 bp, Myceliophthora thermophilia
atgatgagcatcaaaccaggacacatacacacacacacacggtttccatttgaggtcatcatgagcgacggcaaagcgctcgacatagtggtgcctgaggtcggcactcgtgccccgagggtcaacggagacatagccgacttcctggccaaccatccggacctcgaactcggcggcgcccaagggtacaccatagaacgccggaagcacatggaggtatttgccctccacaggctcccaaagttcaaggtttaa

SEQ ID NO: 3017 - protein, 84 aa, Myceliophthora thermophilia
MMSIKPGHIHTHTRFPFEVIMSDGKALDIVVPEVGTRAPRVNGDIADFLANHPDLELGGAQGYTIERRKHMEVFALHRLPKFKV

SEQ ID NO: 3018 - DNA, 294 bp, Myceliophthora thermophilia
atgaacggaaccatagttaaggctaataacaagaaaaagcaagtatacaaactaacccctagaaaggaaattacaactattgacgaaactaccaaggatgtcatcgaagtaatagccacgagctacaaagacaagggcagtgatacggacagtcttggatataacggcgacagcaaagacgaacaagcatcgtattccgaactagtcactatagacctagagacaggtcttgccaaatgggacatagcaagagaatatgcaccgccagtttcgattctcctagtcttaaggtag

SEQ ID NO: 3019 - protein, 97 aa, Myceliophthora thermophilia
MNGTIVKANNKKKQVYKLTPRKEITTIDETTKDVIEVIATSYKDKGSDTDSLGYNGDSKDEQASYSELVTIDLETGLAKWDIAREYAPPVSILLVLR

SEQ ID NO: 3020 - DNA, 285 bp, Myceliophthora thermophilia
atggttcagaacggagttaacgaggcctacgccaaaatcgaggcactcgagggtactaaagcgaagcgtatcaagatcgaactacctagtaaatatagaggaactaaggaagatcttataggattcctgacaaacctccgattctacttctggcttaacgataataagtttccggacaataaagctaaagtcctctacgtagctacgagactagagggcaaggtacttagatggttcgagcctacgtggaacgactatctcattgaggaagacgaagacgactaa

SEQ ID NO: 3021 - protein, 94 aa, Myceliophthora thermophilia
MVQNGVNEAYAKIEALEGTKAKRIKIELPSKYRGTKEDLIGFLTNLRFYFWLNDNKFPDNKAKVLYVATRLEGKVLRWFEPTWNDYLIEEDEDD

SEQ ID NO: 3022 - DNA, 3930 bp, Myceliophthora thermophilia
atggctcagaacgaacgggccttccaatcctcattaccgccgcaaaatgactccgatatcagtatcgacattgccgcggccggcagtcagcccgacttcgaatcacgaccgggcgggatacggccggatccaggggaagaagagctcttcaatatcgaggacaacccgtttgctttcagcccaggccacctgtccaagctgatagagccaaagtccgtcgccgtcctgcagcagttaggttggctgcagggactagtaaagggcctgcggaccgacatccgggcgggtctacatatcggcagcgagggcgagggtgacggtgatggcgcggaccggcgacgtgtgtttggagaaaaccggctgccggaacgcaaatcgaagtcgttcctggagttggcgtgggtggcgctgcaggaccggatgctgatcctgctgtgcgtggcggccgtggtctcgctcgccctgggcctgtaccggaccttccatggccacagtggcgccgagggggcgcgggtggagtggatcgagggtgtggccattgtggttgccgttctggtcgtcgtcctggtcagcgcgctcaacgactggcagaaggagtggcagttccgcaagctcaaccagaagaaagaggaccgatccgtggcactggtccggtccggcaggacggccaaggtatcagtgcacgacgtgctagtgggcgacgtcatggtcctagagcagggcgacgtgatccccgtcgatggggtgctgattgacggccacagcgtcggctgcgacgagtcgtcggcgacgggcgagtcgggcgtggtcaggaagatgccggccgaggccgtctcgcaggcgttccgacgggctcacgatgcagacgccaggacgctcgccaagatggaccccttcctcctctcgggctcccgggtcctggacggtgttgggaccttcctcgtgacggcggtcgggcggcattccgtgcatgggcggaccaggatggcgctccgcactgaccccggcatgacaccgctgcaggcgaggttgaatgtgctcgcggggtacatcgccaagctcggcagcggcgccggcctgctgctcttcaccgtgctcttcatcgagtttcttgcaaagctccctggcaatccagccagcggcgacgaaaagggacaaaccttcctgcgaattctcatgacggccgtaactatcatcgtggtcgccgtgcccgagggcttaccactggccgtgacactgtccctggcatttgccaccaagaagatgacgagggaaaacaacctggtgagacatctgcagtcgtgcgagaccatgggcaacgcgacggtgatctgctccgacaagacaggaacactgaccgagaacgtcatgacggtggttgcgggcagtctgggtacgggagaaggagtcgtcacctttggcgacgggaggattgctagctcggagggttctgacagtggttatgggcctcttgaaaacaggaggaaagcgacagagacccaggacggcggtgtagagaccccgggatggccggcgggcgacgcaacagagcagccacaacgaccacagcaaaagaagcaacacgaacagcagcagcaacaacagcaacagcaagaacagcagaagacacaaaagcatcgacaacaacaagagtttctggcggcgacgagccccgagtttcgagagctcgtaaaggagtcaatcgccatcaacacgactgccttcgagggccaagacgagagaggcaagctcgtcttcgttggcaccaagaccgagacagcgctgctggattgggccaagcgggacctggagctgggcccgctatcggccgagcgtggtaagcacccactagtgcacctcttcccgttcagctcgcggcgcaagtgcatgggctccgtcatccagcggccccccggttacggcgatgacggcggtggcggcgataacggcgagaatgacgactccggatccggagggcgggggtaccgcccacaccgaaatcgataccggctgctggtcaagggggcgcccgaggtggtgctggagaggtgcagcgccggtgtggccgacccgggcggggccgggccgctcccgcgctcgccgctccgggaacccgataaggcgcgcatcgccgaaacggcgtctcggtatgcgtcgcggtctctccgcacgctcaccctggcctttcgcgacatggacgagtggcccccgccgcgaaccggtaacggggctgggattgggagacgggggaatcatgacgacggagttgatggcgatgacaacggtggcagggacgaggattgggccgttgagcttgacgacgtattccgcgacatgacgtggattgccctggtggccatccaggaccccgtgcgcgagggcgtgccggcggccgtgctcgactgccggcgggcgtcggtggcggtcaagatggtgactggtgacaagatcgagacggcgcgggcgattgcactcgagtgcggcatcctcgctcaagaggacgaaggtggtaatgggcatggacaagagcatgcagtgatggagggagcggagttccggcggctcggcgaggagcagaggcgcggcatcgtccgcgagctgcgggtgctggcgcggtcgagtcccgaggacaagcgggtgctggtcgagtcgctgcggtcgcttggcgaggtggtggccgtcacgggagatgggaccaacgatgcgccggcgctcaaggcggccgacgtgggcttctcgatgggcatcatgggcaccgaggtggccaaagaggcgtcggacgtgatcctcatggacgacaacttctcgtccatcgtcaaggcacttgcctggggacgggctatcaacgacgccgtcaagaagttcctccaattccaaatcacggtcaacatcacggccgtggtgctgaccttcgtctcggccgttgccagtgaccaggagcgctccgtcctcaacgccatccagctactctgggtcaacctcatcatggacactttcgccgccctcgccctggccagtgacccgcccaccggcagcctcctggaccgtgccccggagccccggctcgcgcccctcatcaacctaaccatgtggaagatgatcctgggccagtgtgtgtaccagctagccgtcaccctgaccctgcactttgccgggccgtccctgctcccgtcgtcctactcagagccccagcagcacaccctcgtcttcaacgtcttcgtgttcatgcagatcttcaagctcgtcaacagccggcgcatcgacaaccggctcaacatcctcgagggcttgcaccgtaacccgctcttcgtgttcatgatggctgtcatggtggccggccaggtcctcatcatcttctttggcggcgatgccttcgtagtcacccgtctgaccggtcctcagtgggccatttccctcgtgctcggcttcttctccatccccatcggtgtcctcatccgcctgctcccggaccggtggatccgcgccggggtgcggtgggcagctcgaaggcttccctcgtggcgccgccggaagaacgccgaagacgaggagcggggacgggttgtcggcgccgctgcagatacggatgccctctgggacgcctacgccgtcgaggatgccgaagccggtggtgtcggtcgagatttcgggagcaccatgttctcagtgcgggatgacctcgccttcctgaagcgggtgcgcggcgggcggatggcggcgctggccgatgcctttgcagttgaccgaaccaagaagactgagggcgagcggaagctcaggcagcggaagcgctctgggtcggcaatgcggtcggccgtcggggcgcccggtctgctggccgccagcatcggcgccatgtcgcccggcaaccgaccccgttccgaggcccgtcaaaacagtcaatggggattagagcgtagactgccttga

SEQ ID NO: 3023 - protein, 1309 aa, Myceliophthora thermophilia
MAQNERAFQSSLPPQNDSDISIDIAAAGSQPDFESRPGGIRPDPGEEELFNIEDNPFAFSPGHLSKLIEPKSVAVLQQLGWLQGLVKGLRTDIRAGLHIGSEGEGDGDGADRRRVFGENRLPERKSKSFLELAWVALQDRMLILLCVAAVVSLALGLYRTFHGHSGAEGARVEWIEGVAIVVAVLVVVLVSALNDWQKEWQFRKLNQKKEDRSVALVRSGRTAKVSVHDVLVGDVMVLEQGDVIPVDGVLIDGHSVGCDESSATGESGVVRKMPAEAVSQAFRRAHDADARTLAKMDPFLLSGSRVLDGVGTFLVTAVGRHSVHGRTRMALRTDPGMTPLQARLNVLAGYIAKLGSGAGLLLFTVLFIEFLAKLPGNPASGDEKGQTFLRILMTAVTIIVVAVPEGLPLAVTLSLAFATKKMTRENNLVRHLQSCETMGNATVICSDKTGTLTENVMTVVAGSLGTGEGVVTFGDGRIASSEGSDSGYGPLENRRKATETQDGGVETPGWPAGDATEQPQRPQQKKQHEQQQQQQQQQEQQKTQKHRQQQEFLAATSPEFRELVKESIAINTTAFEGQDERGKLVFVGTKTETALLDWAKRDLELGPLSAERGKHPLVHLFPFSSRRKCMGSVIQRPPGYGDDGGGGDNGENDDSGSGGRGYRPHRNRYRLLVKGAPEVVLERCSAGVADPGGAGPLPRSPLREPDKARIAETASRYASRSLRTLTLAFRDMDEWPPPRTGNGAGIGRRGNHDDGVDGDDNGGRDEDWAVELDDVFRDMTWIALVAIQDPVREGVPAAVLDCRRASVAVKMVTGDKIETARAIALECGILAQEDEGGNGHGQEHAVMEGAEFRRLGEEQRRGIVRELRVLARSSPEDKRVLVESLRSLGEVVAVTGDGTNDAPALKAADVGFSMGIMGTEVAKEASDVILMDDNFSSIVKALAWGRAINDAVKKFLQFQITVNITAVVLTFVSAVASDQERSVLNAIQLLWVNLIMDTFAALALASDPPTGSLLDRAPEPRLAPLINLTMWKMILGQCVYQLAVTLTLHFAGPSLLPSSYSEPQQHTLVFNVFVFMQIFKLVNSRRIDNRLNILEGLHRNPLFVFMMAVMVAGQVLIIFFGGDAFVVTRLTGPQWAISLVLGFFSIPIGVLIRLLPDRWIRAGVRWAARRLPSWRRRKNAEDEERGRVVGAAADTDALWDAYAVEDAEAGGVGRDFGSTMFSVRDDLAFLKRVRGGRMAALADAFAVDRTKKTEGERKLRQRKRSGSAMRSAVGAPGLLAASIGAMSPGNRPRSEARQNSQWGLERRLP

SEQ ID NO: 3024 - DNA, 414 bp, Myceliophthora thermophilia
atgtcctggctcgagaggtctgactacttctacggcgacctatggccggagaacatcctcctaagcgaaaccgagcaggtcaaggtctgcgactttgggagggctcggacgcgggtcgccggcctagcgtacgagcagttcgacatcggctcatgtatctacaccatccccaccggggaggtgccgtacggccagcaggagacgcccgagcagttcagagagatgtacgacgcccgcgtccgggggaagttcccgccaaccgaagacgacggggtcttgggacatgttgtatcgtcttgctggcacgcgccctacgacaggatggaggacatgtggaagcagctatccaacgggccgtcggcatgtcgactagttgagatctcaccccggcattccctgacctggctgtgttaa

SEQ ID NO: 3025 - protein, 137 aa, Myceliophthora thermophilia
MSWLERSDYFYGDLWPENILLSETEQVKVCDFGRARTRVAGLAYEQFDIGSCIYTIPTGEVPYGQQETPEQFREMYDARVRGKFPPTEDDGVLGHVVSSCWHAPYDRMEDMWKQLSNGPSACRLVEISPRHSLTWLC

SEQ ID NO: 3026 - DNA, 867 bp, Myceliophthora thermophilia
atggctgcaatcacgtcaaacgactttgtctcctgggatgacttcgtcagaatccgcaactctcaagatgaacaactcggacgagagtttgccgctcttcgccagagactcgacggcgtggagcagactgtcgcagccgaattcggcatgttccgcgacttcctcatcgaggtccaactagactcccggcgcaccgcagcccgcctccagaactatatgctgaagcattcgtacctgccgatttcacccgttcctgcctacgacccactccacggcatcatcaatcctgaccctgccctattccctgggagcgtcggcgctttctataagttgttgcacccatcaaacgacgacgagatacagatgctatcgtatctcatttcgttctacgacattcaactctttacgccgcaggacgaggatgaggcacgaccggaaggcagcgattttgagagagccgtcgaaaggttagaggtgatccttggtttgaatggggacaacttctccaagctcaaggaaccactcgccgaggggcacggggccgaaggacgccggccaaggctcgagccacgcccgaatataccggtcgtacacaagagtcgcctctcggaagagttttctaataataccaggttggaatggagggctcggactcgctcaacgccatcatcgcagcgcccaacgatctacaatctgtggaaggctatggaagcagagaaacgtgcagaacaagagaaacttgcggaacaagagaaacttgcagaacaagagaaacttgcagaacaagagaaacttgcagaacaagagccgctaggcagcgatgccacaggttcaaccagacctttcacaaacccccgggaaccctag

SEQ ID NO: 3027 - protein, 288 aa, Myceliophthora thermophilia
MAAITSNDFVSWDDFVRIRNSQDEQLGREFAALRQRLDGVEQTVAAEFGMFRDFLIEVQLDSRRTAARLQNYMLKHSYLPISPVPAYDPLHGIINPDPALFPGSVGAFYKLLHPSNDDEIQMLSYLISFYDIQLFTPQDEDEARPEGSDFERAVERLEVILGLNGDNFSKLKEPLAEGHGAEGRRPRLEPRPNIPVVHKSRLSEEFSNNTRLEWRARTRSTPSSQRPTIYNLWKAMEAEKRAEQEKLAEQEKLAEQEKLAEQEKLAEQEPLGSDATGSTRPFTNPREP

SEQ ID NO: 3028 - DNA, 1476 bp, Myceliophthora thermophilia
atgtcctctaccgacgaaaagagggtcgatgatgaggccaatgccctcgaggcggccgcagcgccagaggagcagacaaagcccgtctcgaagctcacgcggtggtaccgcagcccgctgttcaacgtcatcattgtcggcttgatctccttcacccagccgggcatctggaatgcactcaacaacacgggcgcgggcggccagcaagagccgtacctggtgaacgggtcaaacgcgctgacattcggcttgatggtctttggctgcaccattttcagcgttgtcgccaacaggataggtgtcaagaaggtcttgatcattggcacactgggctacgccccgtactcggcatccttgtacgtcaacaaccggtatggcaccgagtggttcgtcctcttcggcggcgtgacatgcgggattgccgcctcggctttgtgggcgtccgagggtgccattgccctcgggtatggcaaggtcaaggatcgtggcaagtttgccggcatctggctcggtctccgggagctcggccagctcatcggcgcgtccatccagctgtccatgaatgtccgctccagcagccgcggaaaggtagggtacacgacatacctcgtcttgattgcgctgcagtgtctgggactgccgctcgccctgctggcatccccgcccgagaaggtgatacacagcgatgggacgcgcggccgggtcgtggccaagaacacgaccatcaaggaggaggtgcgcaagacgtggaacttgttgaagcggaaacagatgttcctgcttgtgcccatcctcatcgggttccaatggaacagcacatacctcggcatctatatgaccaagtacttttctgtccgagctcgcaccctcggttccctggtgtccggcgtttctgcgacgtttgccaacatcttctggggctggttctacgacctcaagcgctttagccgcccgaccctggctaaaatctgctggtttttcttcgtcctcggcatgttgggtacctttggctggcaggtgtccaacgagaagctctacggtgactccaatcccagggtcacgttggactgggagaatccgggcttcggccggggatttgcatccatggtcatcctacggttcttgaatgagtcgcattatatgtttgtttactggatcgttggcgccttcttcgacgacatcgagaccttgacgctgacggtcggtcttgtccgaaccttcgagtctgtcgggtccagcatcgcatttggcatcggcgcatcttctgtgtcgcccatggtcaacctcatcatcgcttttgccatgttcgggttcacaatccctgccacatcgctcgtggtgtttttggtgcctgagcgccctgtagacttgcggaaagaggaaagtgaggcgtcttcggttggagaatcggagaatgttgcgccgaacgaaatcgccgccaaggctgttgagtcctccggctcttcaaacacttga

SEQ ID NO: 3029 - protein, 491 aa, Myceliophthora thermophilia
MSSTDEKRVDDEANALEAAAAPEEQTKPVSKLTRWYRSPLFNVIIVGLISFTQPGIWNALNNTGAGGQQEPYLVNGSNALTFGLMVFGCTIFSVVANRIGVKKVLIIGTLGYAPYSASLYVNNRYGTEWFVLFGGVTCGIAASALWASEGAIALGYGKVKDRGKFAGIWLGLRELGQLIGASIQLSMNVRSSSRGKVGYTTYLVLIALQCLGLPLALLASPPEKVIHSDGTRGRVVAKNTTIKEEVRKTWNLLKRKQMFLLVPILIGFQWNSTYLGIYMTKYFSVRARTLGSLVSGVSATFANIFWGWFYDLKRFSRPTLAKICWFFFVLGMLGTFGWQVSNEKLYGDSNPRVTLDWENPGFGRGFASMVILRFLNESHYMFVYWIVGAFFDDIETLTLTVGLVRTFESVGSSIAFGIGASSVSPMVNLIIAFAMFGFTIPATSLVVFLVPERPVDLRKEESEASSVGESENVAPNEIAAKAVESSGSSNT

SEQ ID NO: 3030 - DNA, 465 bp, Myceliophthora thermophilia
atgtccctccgcatcgtccccgccgacaaccaccacaagaccttcacccacctcgcctcgcgcgagacggtcgcgccgtcggccccgggcctgcacgacacgctgcgcgcgggcgtcggcccgtccgccttcgacgtggccgcgaaccggccgatctcgtcgcacccgctcgaggcacgcctcaaggcctgggagtcgacccgcgaggcgctgcgcatggagacgctgcggcgggtctacggcatcgccgagcccgtccgccggcagatggagctcaagatcacgcgcgagggggagtggaagcccatggccctcggcggcggcctccccggcgcgagcgtgcacgaggacatactggccggccgtgatgagaccatcacctgggaggacgtcttcaccggagaggactcgcggccgttggtcggcatgcacgaagagatggagaggaagctgaagatgatgtaa

SEQ ID NO: 3031 - protein, 154 aa, Myceliophthora thermophilia
MSLRIVPADNHHKTFTHLASRETVAPSAPGLHDTLRAGVGPSAFDVAANRPISSHPLEARLKAWESTREALRMETLRRVYGIAEPVRRQMELKITREGEWKPMALGGGLPGASVHEDILAGRDETITWEDVFTGEDSRPLVGMHEEMERKLKMM

SEQ ID NO: 3032 - DNA, 1710 bp, Myceliophthora thermophilia
atgcccagccaaactaacgtcagcagggaacttgaggggcaatcgaggatgcaacgtcacttcataacgttcaatggcgacatcatcccacgattcaatcctgcttgcaacgcggccgggcggatccgggccaccggccccggccccgtcaccggccccggccccggccttgccgccgatatcccgcaagaagcaagcggcggtgctcttctcggctttcatgaccactgctctcacgatcggttacaaccaatccttcggcgtctttcagcagtactacctctcgcccagccaagacgtcctgatcccctcgccggcctcgcaggtctcgccgccgccgacggcgctgctcgccttcgtaggcacgctgtgctacgggctgacctgggccggcggcatcgtggtgaatcccgtgatcgcccggctcgagcacgggagctgggcttccgccacgtcctgactcggctctggcgccgcaggctgctgcgcctgctgaccccgcgcgtcatcaccgtgtcgggagtgctcgtcacctctgccggcttcgtgctggcatccctcagccgctccgtatggcagctccttctcacacagggctttctggccggcatgggcatgtcgctcttgtactttccgctcttggctccggcgcccgagtactttaccaaccaccgggctaccgctcttggttttgcgcgtttccagatcctagccggcggaggcgcgggcggcctcgtcctctcgcccgtcattcgagcgctcctcagctccattggtggccgctggactctccggctctacgccctcttcaacctccttgcggggctacccatcgcttggacggttccgcggagccggttcgcggtagggcgtaatactgcggcagtctccactcccggtcaccgattgtcggaatcccccgagagaagggaggaggaggaggaggggcagcagcagcgggggttcggcacgcacgtgtcgcgggcgctcgcgtcgcgaccgaccttcctgctctcggcagcggcggcgttcctgcaggcggcgggcgcgcagctgcccatcgccttcatcccctcgtacacggcggcgctggggctgggtggtgatggcggcggcagtggcggcggcggcgaggaggagggcgcgtcgaccatgggcgcgacgctgctggcggccagcagcgcggtcaacgcggcgtcgcgggtggtggcgggctacgcgggcgaccggctcgggcggcagaacgcgctggtgctgacgctgctgctggccgcggggagcgtgtacgccttctggctgaccagcgcgctgctggccgtggaggaatgggggggcggcgcgtcgtcgtcgttgtcttcgtcgtcggcggcggcctggtcgtcgtcggcctggtcgctctggctcgccttcgtcgccctctacagcttctccgtcggcgggtattatgcgctcttcccggccctggtggcggatgtttttgggatcagacactacgcggccgtcaatgccttcatcctcttcgtgagggggctggggactttgttcgggagcccggtgggcgggcagctgctcgggagcgcagccgagggagcgcgggcgtataccagtgttgcctgctgggacggggcgctgctgacggccgcgaccttgtgctgtgttggggtccggtgggcagatgcgaagggaaaagggtggaggtggattgcatga

SEQ ID NO: 3033 - protein, 569 aa, Myceliophthora thermophilia
MPSQTNVSRELEGQSRMQRHFITFNGDIIPRFNPACNAAGRIRATGPGPVTGPGPGLAADIPQEASGGALLGFHDHCSHDRLQPILRRLSAVLPLAQPRRPDPLAGLAGLAAADGAARLRRHAVLRADLGRRHRGESRDRPARARELGFRHVLTRLWRRRLLRLLTPRVITVSGVLVTSAGFVLASLSRSVWQLLLTQGFLAGMGMSLLYFPLLAPAPEYFTNHRATALGFARFQILAGGGAGGLVLSPVIRALLSSIGGRWTLRLYALFNLLAGLPIAWTVPRSRFAVGRNTAAVSTPGHRLSESPERREEEEEGQQQRGFGTHVSRALASRPTFLLSAAAAFLQAAGAQLPIAFIPSYTAALGLGGDGGGSGGGGEEEGASTMGATLLAASSAVNAASRVVAGYAGDRLGRQNALVLTLLLAAGSVYAFWLTSALLAVEEWGGGASSSLSSSSAAAWSSSAWSLWLAFVALYSFSVGGYYALFPALVADVFGIRHYAAVNAFILFVRGLGTLFGSPVGGQLLGSAAEGARAYTSVACWDGALLTAATLCCVGVRWADAKGKGWRWIA

SEQ ID NO: 3034 - DNA, 4812 bp, Myceliophthora thermophilia
atgttcacgggaagcaaggtggcccatgggggcggatttggcggcttccgcagctcgtcgacatcactttcctacctcgccccgcctcctgatttcactgggatcccccatgaggtcgtggttgcctacaagaacctcaccaaaaaggacagtacaacaaaagagaaggcattacaggacatacttggctacgtacaaacccttggcgctgagggtcgggttccggacgagccagtgatagacgtatatatcgagctataccctcgactatccgtcgacgactccgcccgcgtccgagagctctcgcaccagctgctcttccatcttctcaacttggcaaagaaacgcatggcgaagaagctgcccgcctttgtcggaccatggctagccggagcctttgaccgagacaagcgcgtgctgaaagccgctgccgatgcgcttgccgcgtttctacaaacaaaagagaaggaggaagcattctggaaggcggttcagggccgagccctcgagtttgcgacggaggcgatcaaagaaactccagatactctgagcgatgagagggcaaccacgaaacaggactcggacgcgaaatactaccgcgttgtcggtgccagcctaaacctggccctgaacttgatgcggaaaggtgatgttggtgtactcaaagacggattggctggctatttggaggtggacgcactgtggacaatgtcaacagccgacgatgcatttgtgcggagagctttttatcagttcctggacacacttctgaccatcaggcctgacatcttggagccgcggctacagcaggttggcaaggcgctcgttgcagacagcatgaaaaaaggtcagccaggttcagcaaccgacctcctgaaggtcctgatctccttgacaaagcgcttcccgcaggtctggggcactcagaagcacccgctgcagcgactgcagcagttcgtcgctcagggttctcagggcggagcagaagagtactggcaatccttggatcagctcctccaggtcctccccaagaaaacgccctctcccgaggtggtatcgaccttcctcggcttcatgcgcaaagggattgcggagaggctcgaaacccgtacgagtcggtacagggcctttcagacttatgcgcgcgtgttcgaggtctttcttcacgacttgcctctcaccacaagtctcctcgaagagaacctctccagcgtcagtcgacaatacctccaccccacttccgaatcgtcgctgccgtcaccgccacgacccgagcctctcgccgatgcttggatgattgtatcaaggcactcggatgacgaaacgtgtggagcggtgaaggaggagtggcacaagttgggaactgcgttcctctctcgcatgtccaactcgctgcccgaggtttccgcggggtaccagaactcccaaacatccattgcttcggagggagagcggtggtttgcactcgcagccaacgtactttctcgggagggtggcgagcacacgtcgctcttcagtgtcatcgcggaaacgtcgactaatgttttgcgtggggctctggacctcttgaccaggcgaaacttcaagcccttcggggctgccgctgtcatccagtcggcattcagacactgccctcgtctctgcgccgaaagcaacctcctagcgtctctctacccagccgaccaagccgaaatttacggcaccgtcgttgcgtccccgtcgctgccctacttagtctcgggcctgaacacgctttcagaggggtcacacggccaatttgagaaggtttgggtttcacttgtcgaggcagcccttcgccttcccgatcgcccatccacaatatcagctattagggtgttgattgggattccgtctgttgccacatattcccagagccttactggccttcagagtttctccgtctcggcttggaaagagtatgcagatggcggaagccaagcgggattgcaggatctatgcgaggccacattatcttacgacaccctggcggaggagtcactggacgccgtggtagccggcgtcatatccagtcttgaagccccagagacggcaggtcccgctcttgttgccctcgagttggtcctgaagaagaagccggagctcttgtcatccaaggacgatctccacgtgcggcttgttaccattcttctcgctcttactgagctctccgagccccgattgtccgagaaggcaaaaacattaagacaactcctcggagcgccaccatctgggcagaaccccgtcaccagaatcttggagcagcaccttagcgatgctaacccgtcctctctcgaagttgatactttggtccaacaggcgttgtcagccctgaactcaggctctgtgcccgccgacgacatctttcccagctcgactgtctggatgaaagagctctctccctttctcaggcggcctccgcctccatcattgtcattgacaagcagcatgggtggtgcatactttctggtccagggagatccaaacgcaaaacctccgagaccgcgccgggatagcagcgggcgttcggttcccgccaggatggctctgttcacagccaagctcctctcgtctggcgtcgccttgtcctcgttaccgcccgagttccagctggaacttgttttcctgctctgtctcacggaagccatttacgaagatcaactgtccgcagctcagactgaaggcttgtgggctcaaggctctgagagcgagccggacgcccgagagtttctggatctgaactctgcagctgttcgagctgtccttcaagtttgtggggattggaaagactgggacatgtcaggaaactcgctcgtagagcgtctgatcaacttcatgctccacgaggctgtcggcctgagcgctgctgcgttctacgccgcgaaatctctgagttccctcttccagctcctggtacagacccacggtgggccgcctgcaaatctcgagagctggttgctcaagttgggaatcatgaaagcggcccctaatacgagcttggccacggctgccttccttacaggctttggagaagcgcttgcttcttccaaagtcaccgcaaatttctgtgctcgtctcatcagcgagctaccgggatttgatggcgtctctgaccgatttccccgggccctaccatccttggctttgctcaatctctgcatggacgtctacgagaccggggcggttccaatcgaaacgcgcaaacaagttctcgccctccagcagctgacacggtggacgggtgctccagaggaacttggttaccaggcggccgccgaaacctgcaaggccatttctcgtcttcttccgggaactaaggatacgtacgggcaatactgggagcaggcgatcgagtactgcctctggctgtggaacaaagccgccaaggacaagcatgaggagcggctgtcatatatacacgcgtctttgaagttgatgcaggcactccacgctgtcgatgagccgaatgacgacctcgaggaagccctggcgagccaccgggatgctgagacttcagcgctcattgctctcctgggcaccccacaggaagcgacctcgagcctgccaagtcaactcgtagacgcgctcatcgcacgggccgtggccaagattccaaatgtgccccttgcggatctcggcgacatgtacgaggccgtcgcatccggatcccgcgagatccagagagccgcatttgggttgctgcacaaggccctgcctgcagcccaagaggacatcaatcttgcagtcgtgctggacaagaaagccgctaatcttccggatgagttgctgtccctgcttctcaacgccccgaaccccgaagactacaccgacgaggacttggctcagttccctgtcgcgatacgctcgtacctcctcgcctggcacctcgtgttcgacgcctacagcaaggcctcctttagggtccgcaatgactacacggaaaacctcaagagcggcaagcatctcgaccccttgctccgcttcctggccgatgtgctcggccacgctcttggtcgggcgcttgatcttgacaaggaagggttcacggcggagcatatccgctcttacagcatcgacctcgccgactcagagccggcagagcgggacatgaactggcttctgatccacctcttttacctgatcctcaagtacatccccgggttgttcaagatgtggtatctggattgcgcttcaaagcagaccaagaacgcgatccagtcgtggatggagcggttcttctcgcccctcatcatttcggacgccctagacgaggtggtcgaatggtcatcctcgcaggaggccggagatggggacactgaggagatcattgtcaaggtcagcaagacatcgcgagagattaccgcgggatacccggtggacgacgatgcagccactatctccctacgcgtgccgacatcgtacccgctagatcccgttgacgtggttagcgtgaagagggttgccgtcaaggaggacaagtggcagtcatggctgaaggctacgaaggccgtgatcatgtttggcaactgcagcctcgttgacggcctgatggctttccgtcgcaacatctcgctcgcgctcaagggccaggaggagtgtgccatttgttactcgattatcgcccaggataagacgatcccggacaagaaatgcggtacatgcaaccacttcttccacaaggtgtgcctgtataagtggttccagaacagcggcaggaatacttgcccgttgtgtcggaacgggattgactatctgggttcggataccaagaggagtcggccggagcatgagtag

SEQ ID NO: 3035 - protein, 1603 aa, Myceliophthora thermophilia
MFTGSKVAHGGGFGGFRSSSTSLSYLAPPPDFTGIPHEVVVAYKNLTKKDSTTKEKALQDILGYVQTLGAEGRVPDEPVIDVYIELYPRLSVDDSARVRELSHQLLFHLLNLAKKRMAKKLPAFVGPWLAGAFDRDKRVLKAAADALAAFLQTKEKEEAFWKAVQGRALEFATEAIKETPDTLSDERATTKQDSDAKYYRVVGASLNLALNLMRKGDVGVLKDGLAGYLEVDALWTMSTADDAFVRRAFYQFLDTLLTIRPDILEPRLQQVGKALVADSMKKGQPGSATDLLKVLISLTKRFPQVWGTQKHPLQRLQQFVAQGSQGGAEEYWQSLDQLLQVLPKKTPSPEVVSTFLGFMRKGIAERLETRTSRYRAFQTYARVFEVFLHDLPLTTSLLEENLSSVSRQYLHPTSESSLPSPPRPEPLADAWMIVSRHSDDETCGAVKEEWHKLGTAFLSRMSNSLPEVSAGYQNSQTSIASEGERWFALAANVLSREGGEHTSLFSVIAETSTNVLRGALDLLTRRNFKPFGAAAVIQSAFRHCPRLCAESNLLASLYPADQAEIYGTVVASPSLPYLVSGLNTLSEGSHGQFEKVWVSLVEAALRLPDRPSTISAIRVLIGIPSVATYSQSLTGLQSFSVSAWKEYADGGSQAGLQDLCEATLSYDTLAEESLDAVVAGVISSLEAPETAGPALVALELVLKKKPELLSSKDDLHVRLVTILLALTELSEPRLSEKAKTLRQLLGAPPSGQNPVTRILEQHLSDANPSSLEVDTLVQQALSALNSGSVPADDIFPSSTVWMKELSPFLRRPPPPSLSLTSSMGGAYFLVQGDPNAKPPRPRRDSSGRSVPARMALFTAKLLSSGVALSSLPPEFQLELVFLLCLTEAIYEDQLSAAQTEGLWAQGSESEPDAREFLDLNSAAVRAVLQVCGDWKDWDMSGNSLVERLINFMLHEAVGLSAAAFYAAKSLSSLFQLLVQTHGGPPANLESWLLKLGIMKAAPNTSLATAAFLTGFGEALASSKVTANFCARLISELPGFDGVSDRFPRALPSLALLNLCMDVYETGAVPIETRKQVLALQQLTRWTGAPEELGYQAAAETCKAISRLLPGTKDTYGQYWEQAIEYCLWLWNKAAKDKHEERLSYIHASLKLMQALHAVDEPNDDLEEALASHRDAETSALIALLGTPQEATSSLPSQLVDALIARAVAKIPNVPLADLGDMYEAVASGSREIQRAAFGLLHKALPAAQEDINLAVVLDKKAANLPDELLSLLLNAPNPEDYTDEDLAQFPVAIRSYLLAWHLVFDAYSKASFRVRNDYTENLKSGKHLDPLLRFLADVLGHALGRALDLDKEGFTAEHIRSYSIDLADSEPAERDMNWLLIHLFYLILKYIPGLFKMWYLDCASKQTKNAIQSWMERFFSPLIISDALDEVVEWSSSQEAGDGDTEEIIVKVSKTSREITAGYPVDDDAATISLRVPTSYPLDPVDVVSVKRVAVKEDKWQSWLKATKAVIMFGNCSLVDGLMAFRRNISLALKGQEECAICYSIIAQDKTIPDKKCGTCNHFFHKVCLYKWFQNSGRNTCPLCRNGIDYLGSDTKRSRPEHE

SEQ ID NO: 3036 - DNA, 1242 bp, Myceliophthora thermophilia
atgtcatcgaatcgcccgccccgcgcggtagcctccgacgacgacgatcccatcatcgcaaattactccgtcttcatcaagccgccccttccagaaaaccgcaacctcgtcgtccttcaatatgtgaacaagaccgcccaggatccagcgcagatccgcgtcccacgcatatccgagctacgcgttaagcccaagaccggcatgtacgaggtcgacgtacccatcgacaccaccgaggcatacgacaggaacaagggtatcgcgtggggtaccgcgctccagaagtccatggaggccaagaagggcggcagcttgggtctcgcgggaggcttcaacatcgtcgccacctccacctcggcgcgcgggcggcggggcgccggcgcgggcgccgacgacgagaccccgccgacctgggccggagcaagcgcggcaagacaaaaaaaccttcacctaacccccgtctcttccgtcgtccatctccgcccagtcccccaccacatcgacgcggcgaccgaacaggagcgcctggcgcgcggcggcgccaacagcgcgggcggcagcggcggacccggcgacaagtccggcaccggcgccggcgccgcgggcgcctcggccggccgcgcgatccacatgaccatcaagtcggccatggacgccgacggcggcgcggccaccgagaccatggcggaccgcctgcgcaacgtccagaccgagacctggcagcgcatggaatgggtgcacgacgaggccgagatggcctgggaggcctacaacgagtgcctgctcctccggccggggaacggcggcggcggcgccgcggccgcggccgcagcggaaggggaagcggccgaggataaggggaaagggaaggaggtcgccggcgctgctgaggcggcggcagcagcagcagcagcaaccagtgccgacgagagtggcgcagcggacctggtcgacaaggtgccctggctgaagacggattgggaagagcaggagctgttgcgggcagtcagcgggatagagggccgacaggcagatccaaatggcaacagtgaaaaaaagcagggaaaggagactgcggtcaagatggaggagccggcggcggcggaaagccgaaggcaggtcgggcggacgggtggaagcgcgaatgccgcgtcaaccgcgtcaaccgttgctgctgcgtccggcgcaaggaagactacaagaaagggagcgtcgaggggaactgcgatggagatagactag

SEQ ID NO: 3037 - protein, 413 aa, Myceliophthora thermophilia
MSSNRPPRAVASDDDDPIIANYSVFIKPPLPENRNLVVLQYVNKTAQDPAQIRVPRISELRVKPKTGMYEVDVPIDTTEAYDRNKGIAWGTALQKSMEAKKGGSLGLAGGFNIVATSTSARGRRGAGAGADDETPPTWAGASAARQKNLHLTPVSSVVHLRPVPHHIDAATEQERLARGGANSAGGSGGPGDKSGTGAGAAGASAGRAIHMTIKSAMDADGGAATETMADRLRNVQTETWQRMEWVHDEAEMAWEAYNECLLLRPGNGGGGAAAAAAAEGEAAEDKGKGKEVAGAAEAAAAAAAATSADESGAADLVDKVPWLKTDWEEQELLRAVSGIEGRQADPNGNSEKKQGKETAVKMEEPAAAESRRQVGRTGGSANAASTASTVAAASGARKTTRKGASRGTAMEID

SEQ ID NO: 3038 - DNA, 876 bp, Myceliophthora thermophilia
atggctgaacgagccgaagacgcggacgatatccctcaacccgagtctgccccgccaaccacggaccacgaacaacaacaacaacatgactctcccccacccaaagcgcccgccaagcgcaatgcgtttgaggaactcatggcgccaaaacccaaagctcccatctcgcaagccccgcaattcctcgcccacaaagcgtcccaggtcatccgcggcgtctggcgaggcgccctgatcgagtacatcgagcacccggagcgcttcccagacaaggtcctgcgcgtgacggcggacacggtgctcatcaaggacgccttccccaaggccaccgtccacctgctcctgctcccgcgctccccggcgcactacctggtgcacccgcacgatgccttcgccgacccggccttcctcgccatgatgcggggcgaggccgcggtggccgccgagctcgccgccgccgagctggcgcggaggctggggtccttctcggccagcaaccgcgcccgcgacgaggccatgagccgcggcgtggcccccgaccagctgccgcccggccgggactacggccgcgacatccgcgtcggcacgcacgcgcacccgtccatggcgcacctgcacgtgcacatcatctcgagggacatgcgctcggagaagctgaagcaccggaagcactacaacagcttcaacacgcccttctttgtcccgctggaggaccatccgctcgcccaagacgacgtgcggaggcagacggggtatcagaacgggaacctggccaaggatttagtatgctggaggtgcgggaaggggtttggtaatcggttcgccgagttaaagaggcatttggaggacgagtttgaaaagtggagggcagagtag

SEQ ID NO: 3039 - protein, 291 aa, Myceliophthora thermophilia
MAERAEDADDIPQPESAPPTTDHEQQQQHDSPPPKAPAKRNAFEELMAPKPKAPISQAPQFLAHKASQVIRGVWRGALIEYIEHPERFPDKVLRVTADTVLIKDAFPKATVHLLLLPRSPAHYLVHPHDAFADPAFLAMMRGEAAVAAELAAAELARRLGSFSASNRARDEAMSRGVAPDQLPPGRDYGRDIRVGTHAHPSMAHLHVHIISRDMRSEKLKHRKHYNSFNTPFFVPLEDHPLAQDDVRRQTGYQNGNLAKDLVCWRCGKGFGNRFAELKRHLEDEFEKWRAE

SEQ ID NO: 3040 - DNA, 297 bp, Myceliophthora thermophilia
atggtacctcctatgcttaaattaacggatgacttatcgggtacgcccgtcgcgaacactataactactagcaggtcgactcctgctcccgtaacccctcgaaagctcgtgttagaatcgtttgagctgactaaagatagcgacatcgaagctagcgagcttcgtaaggtgccctacggaatttcctataagttcctgcttcttatattagataatataaaggagtacgagctcgataaagctaaactcgcgcgttttacgaagatcgcctactctatatacgatatcttctactag

SEQ ID NO: 3041 - protein, 98 aa, Myceliophthora thermophilia
MVPPMLKLTDDLSGTPVANTITTSRSTPAPVTPRKLVLESFELTKDSDIEASELRKVPYGISYKFLLLILDNIKEYELDKAKLARFTKIAYSIYDIFY

SEQ ID NO: 3042 - DNA, 513 bp, Myceliophthora thermophilia
atggacggtagacaaaccgagactgtgagaagctccgttgtcgaggagcagcagcaccagcaccagcagcaccagcagcaacagcagcagcagcagcgccccattgtccacgatcgggccaccttcgcggaggtagcggagagactgaggggccacatccgcgtggtccaccaagaggccgacctgatcgagtccaccgtcgacgacgtcctgcgggaccccaacctcgaggagctccgcgaggccgccaagcgcgtccgcctcaccgcgcgtttcatgggcttcgagctggaccgcctgatggccatccacggccgtctcgagcggtcccagaccgttgtgcccagcaggaccgtcgaaaccaccgccgctgtcgccctcgcggccgccgccacccctgctgacgatgctgcggctgccgcgtccgggtcttctggctctgctggctctactggttctgatgacgatcccgccgacgccggtgactccagctccggttctgcatcggcttaa

SEQ ID NO: 3043 - protein, 170 aa, Myceliophthora thermophilia
MDGRQTETVRSSVVEEQQHQHQQHQQQQQQQQRPIVHDRATFAEVAERLRGHIRVVHQEADLIESTVDDVLRDPNLEELREAAKRVRLTARFMGFELDRLMAIHGRLERSQTVVPSRTVETTAAVALAAAATPADDAAAAASGSSGSAGSTGSDDDPADAGDSSSGSASA

SEQ ID NO: 3044 - DNA, 2214 bp, Myceliophthora thermophilia
atgccgatccgcgtcaagtcgagggcacagcatgcagaggctctgcggaccccatcaccaactggcatggcacactacagccgatatggtgccgaactacccgacatcagcccagacgatagtttccgcgtgctggtcaagaagttgtctgtttacattgccggcgtcatccagcttcctgtgacctttgagcagttgagaaccacgagcgcgggggatggactgcgtgcgctggttgaccacctgggcacgaattgcactcaccctgccatcgtgaacgcgctacttgcgctcaaatggcactatggcgcgattagtgaggacaagggactgaacgaagcccgggccaatggctgtgagattgtggcctggcgcttcctcacccatctttccgagagagaagcggtggattactgtctctacgagatcccagaccccaaggacgcggacgcgagtcccagtgacgaagaaaccgccgtcgacgagcacagtgctctcctgggccaggcctggcgtggcaccgccaactcggcccgccaggcctttgcccagccagcgagcctcaagcgcaacatgctcctgcaatccatctctcggcttaccatgagcatgaccgccgacgacgacgatgacgaggatgaggacgacccgactgcgcacttcaccaatctcaacgccctcgagattgccgccatcgcggacgccaagcgcttcctgagccagaatgtggtccagaagatcatcaccggtatctggaacggcgacatcatcttttgggactcgctctcggtatactctgtcaagaagccgcgcttctacaaacccgccaccgccgaccccttttcccgcctgcgcgtccccaaataccttaaatccttcgaagttatcttctttaccagcttcctcttcctctactacgctgttctgatggagcgagacccaacccacatcactaccctagagatcttcctgtgcctttggctcgctgcttttgcctacgacgagctgagcgagtggatagatgctggatccatcttctacgctactgacgtttggaacatctttgatatggccatgattggaattggcattacctacttcgtactcagaattgtcggcttggaaacgcacaattctcgtctcgttgatctctcatttgacatattggccctcgaagcgctgttcatggttccccgtgtcttctctattctcagtctgagtccgtactggggtaccctcattccatgcttaaaagagatggggaaagacttcctcaaattcatggtgctcgttgtcgtcatatatgtcggcttcctgacgacattctctttggtcggccgcgacgtcttctccctcaagaaaatgacggggttcctaacccgcatcttcttcggttcaagttccgtcggtttcgacatcatgtacgacatcgaccccatcttcggccctcctctcatgaccctcttcatcatgctcagctccatcctgcttaccggctccctgaccggtatgctctccaactccttttcacgtgtcatcacccacgctcgcgaggagtacctctacgtctacagcgtgtacgtcttggaagcttccacctccaaccgcctgacgcacttctatccccccttcaacctgatcgccctcgtcattttccgcccgctgcgcctcttcctgccatcggaccacaactttcgcaaggcccgcattctgctcctcaaagcaacccacctgcccattgttgcggtgattgagttctatgaatggctgcgcggcagagccaacaagggtacgcagtaccacgccttccgcggacctcgctacaccaccattggcagccccaacccagcggctacagccaagcgcttctcgcaccagcaacgccacaaacagtcctgcgcctccctccgcgctgacgcctccgctgctgccgcccccaacacgctccgcccgcccctgccgctcagcaacaaaactgcccccgagatgacggccactcatcccgatatgggggcctcgtcatccactgaaatcacgccgcaccagcggcaggagaccgccggggaggccgaggtaggggcgatgggcgcgccgtccgccgatgtcgaggcgcgaatcgccgacttgtcggccaagatcgagcggctgaccgagctggtggtcgcccttcacgccaatcagagtcgccgtttaacggacgtcaacgttccctag

SEQ ID NO: 3045 - protein, 737 aa, Myceliophthora thermophilia
MPIRVKSRAQHAEALRTPSPTGMAHYSRYGAELPDISPDDSFRVLVKKLSVYIAGVIQLPVTFEQLRTTSAGDGLRALVDHLGTNCTHPAIVNALLALKWHYGAISEDKGLNEARANGCEIVAWRFLTHLSEREAVDYCLYEIPDPKDADASPSDEETAVDEHSALLGQAWRGTANSARQAFAQPASLKRNMLLQSISRLTMSMTADDDDDEDEDDPTAHFTNLNALEIAAIADAKRFLSQNVVQKIITGIWNGDIIFWDSLSVYSVKKPRFYKPATADPFSRLRVPKYLKSFEVIFFTSFLFLYYAVLMERDPTHITTLEIFLCLWLAAFAYDELSEWIDAGSIFYATDVWNIFDMAMIGIGITYFVLRIVGLETHNSRLVDLSFDILALEALFMVPRVFSILSLSPYWGTLIPCLKEMGKDFLKFMVLVVVIYVGFLTTFSLVGRDVFSLKKMTGFLTRIFFGSSSVGFDIMYDIDPIFGPPLMTLFIMLSSILLTGSLTGMLSNSFSRVITHAREEYLYVYSVYVLEASTSNRLTHFYPPFNLIALVIFRPLRLFLPSDHNFRKARILLLKATHLPIVAVIEFYEWLRGRANKGTQYHAFRGPRYTTIGSPNPAATAKRFSHQQRHKQSCASLRADASAAAAPNTLRPPLPLSNKTAPEMTATHPDMGASSSTEITPHQRQETAGEAEVGAMGAPSADVEARIADLSAKIERLTELVVALHANQSRRLTDVNVP

SEQ ID NO: 3046 - DNA, 420 bp, Myceliophthora thermophilia
atgacaaaggagaggaaaaacccagactggaccctgcttggccgcgaccaaacggctgctgggcgcctgggctgtcagtgttcttcagtcgaacgttgccagagcgagcgagcctcgcgccttcttccccctgagcacccgcgacgtgttttaatttcgatcgtcccaatcgagaagccgcacccgtggcgcgcgggccaattaaacgaagcgtcaaccgtggggttgccattggttcaggcagctacgcctgagcttacactagtttgcaaggcacaggcccagagggccgcatcgaccgccgcatctcagattggggttctgggcgcccgagagccatctctgttttgggggcctctcgtcgatgagcttggattgttgtttccgattcctgagggcaaacagaagacccacagctaa

SEQ ID NO: 3047 - protein, 139 aa, Myceliophthora thermophilia
MTKERKNPDWTLLGRDQTAAGRLGCQCSSVERCQSERASRLLPPEHPRRVLISIVPIEKPHPWRAGQLNEASTVGLPLVQAATPELTLVCKAQAQRAASTAASQIGVLGAREPSLFWGPLVDELGLLFPIPEGKQKTHS

SEQ ID NO: 3048 - DNA, 807 bp, Myceliophthora thermophilia
atgtcgccaagcgccctgcccaccgagaacggtgagatcccagtcgaagtgggcgtggtgcccaacccgaacccgtcgatcaccggccgatggaccgtggataaggtgctcgagacgatcccgacgggaaagcctgcggaggggacgagctcgccagtgggatacttccacatcctcgagcgtctcaagacgacaaagcgggagggctggcggagattcgggatcaatcggggcgagtcgatctcggatcacatgtaccggatgtccatgatgagcatgcttgcgccgccgtcgctcgccgccaggctagacctgaacaagtgtatgaagatgtgcctgatccacgacatggctgagtccctcgttggcgacattacgcccgtcgacgacgtcccaaagcccgagaagagccggcgcgaggcggagacgatggactacatcaccaagcggctcctgggcaacgtggacgacggcaaggttggggcggaaatccgcgccatctggcaggagtacgaggattcgaagacgctcgacagcctctacgttcacgacatcgacaagatggagctcctcgtgcagatggtcgagtacgagaagcgcggcaaggggaagctggacctaggcgagtttgcctacgtccagaccaaaatcgtgctggacgaagtcaagacctgggcagaagagatcatgaaggagcgcgaggacttctgggcggggcaagcgcacgtgcacggagaagctggtgttgctggcggcgttcctcctgagaaaatggccaagcaagatgcgtattacagcagggagtag

SEQ ID NO: 3049 - protein, 268 aa, Myceliophthora thermophilia
MSPSALPTENGEIPVEVGVVPNPNPSITGRWTVDKVLETIPTGKPAEGTSSPVGYFHILERLKTTKREGWRRFGINRGESISDHMYRMSMMSMLAPPSLAARLDLNKCMKMCLIHDMAESLVGDITPVDDVPKPEKSRREAETMDYITKRLLGNVDDGKVGAEIRAIWQEYEDSKTLDSLYVHDIDKMELLVQMVEYEKRGKGKLDLGEFAYVQTKIVLDEVKTWAEEIMKEREDFWAGQAHVHGEAGVAGGVPPEKMAKQDAYYSRE

SEQ ID NO: 3050 - DNA, 822 bp, Myceliophthora thermophilia
atgacctcgaacatcgacgaccccattgccgaacacggctggacgccggttccgctcgacgccgacgccattttccagggcaagccatacctccacgagcccgcgccggtgctggtgaaggacattcacttcccatccgatgaccccctcgtagctagggctcaggagtacgccaaggaacaactccccctgcagacctacaaccactctatgcgggtgttttactgggcaaccgccattctccaccagcagttcccttctcacgccaaggcgctctccccttccaccctggccctggcctgcctgctgcacgacatcggcaccgccccggccttctggacgtcgactcgcctctcgttcgagttccacggcgccatcacggcgatcaacctgctcagctcccctccgcccagcagcaccacctcccaggccgttgcgcccgcgccctcgccatcgcccgcgcccgcgcccgctccccaggcccaggccgaagccgtgtgcgaggccatcatccggcaccaagacctggcgctgggcagcgtgggcgtgcgggcgggcaccatcacgctgctgggccaggtgctgcagctggcgaccgtgtacgacaacgtgggcgcgcgcgcgtacgccgtgcacgcggccacgcgcgacgacgtccaccgggccttcccccgcggcggctgggaggcctgcttcgccggcatcgtccgccgcgagattgcggcgaagccgtgggcgcactcgacccacctcggcgggcccgacggcgagctcattgccaacgccgtcgagggcaacctgctgatgaaggcgtacgagtga

SEQ ID NO: 3051 - protein, 273 aa, Myceliophthora thermophilia
MTSNIDDPIAEHGWTPVPLDADAIFQGKPYLHEPAPVLVKDIHFPSDDPLVARAQEYAKEQLPLQTYNHSMRVFYWATAILHQQFPSHAKALSPSTLALACLLHDIGTAPAFWTSTRLSFEFHGAITAINLLSSPPPSSTTSQAVAPAPSPSPAPAPAPQAQAEAVCEAIIRHQDLALGSVGVRAGTITLLGQVLQLATVYDNVGARAYAVHAATRDDVHRAFPRGGWEACFAGIVRREIAAKPWAHSTHLGGPDGELIANAVEGNLLMKAYE

SEQ ID NO: 3052 - DNA, 1158 bp, Myceliophthora thermophilia
atgcctgaccaggttctggatgatatttcgcatcgccgatacaacccattgactgggtcttggctcctggtttcgcctcatcgcaccaagcgcccatggcaaggccaacaagaagccccatcgaagaacatccttcccgagtacgaccccaagtgttacctttgtcccggcaaccagcgtgcccagggtgacagaaaccctcactacaagaacaccttcacgtttatcaatgactacagcgccgtgaaggagcaacaacaggactacaacccagacacagagaaggatgacatcgcttctctcctgctgcaggctcagcccgtcaccggccggtgctacgtgctcacgttctcgcctaggcacgacatcaccctcgctgatatgacagccgcggaaatattgcccgtcatccaaacctggacccgcatctatggcagtcacttgtcggctacccacccactcaaggcccgggcggacgagatcctctccgccatcccagtcaaccccgacggcgaggtcgacccacccaagaaccagctgcgctacatgcagatattcgaaaacaagggcgccgccatgggttgctctaacccccatccacactgccaggtgtggacgaccagcacgatgcccgaagagccaggaaaggagctggtgcagatggccaagtatagggccgacaacggtcgtcacctcctcgcggactacgtcaagctcgagatgaagaaacaagagcgcgtggtctggcagaatgagagctttctcgttgtctgcccctggtgggcggtgtggcctttcgaggtcatcatcatcgcgaagcgccacgtacgcgcactggtcgatctcacggatgacgagcggcttcaattcgccgaggccgtgcaggaggtcacgcggcgctatgataacctgtttgagacgagtttcccgtacagttccggcatccaccaagcgccgctggactgcactgaggaggaagccgagacaagctggttccacatgcatttctacccgcccctcctccggtctgccaccgtccgcaaattcctcgttggatacgagttgatggccgagccgcagcgagatattacccccgagcaggcggctgcacgcctgaggagttgcggaggtgtcctataccgcaagctgctgaattag

SEQ ID NO: 3053 - protein, 385 aa, Myceliophthora thermophilia
MPDQVLDDISHRRYNPLTGSWLLVSPHRTKRPWQGQQEAPSKNILPEYDPKCYLCPGNQRAQGDRNPHYKNTFTFINDYSAVKEQQQDYNPDTEKDDIASLLLQAQPVTGRCYVLTFSPRHDITLADMTAAEILPVIQTWTRIYGSHLSATHPLKARADEILSAIPVNPDGEVDPPKNQLRYMQIFENKGAAMGCSNPHPHCQVWTTSTMPEEPGKELVQMAKYRADNGRHLLADYVKLEMKKQERVVWQNESFLVVCPWWAVWPFEVIIIAKRHVRALVDLTDDERLQFAEAVQEVTRRYDNLFETSFPYSSGIHQAPLDCTEEEAETSWFHMHFYPPLLRSATVRKFLVGYELMAEPQRDITPEQAAARLRSCGGVLYRKLLN

SEQ ID NO: 3054 - DNA, 1569 bp, Myceliophthora thermophilia
atgggcgtgattcgcaagaagatcgcagccaggggcggtgaaggaggtgtgaaatatgtctgcgatgtctgttctgcggatatcacttcaaccgtccggatcagatgcgctcatagcgcctgcaacgactacgacctctgcgtacaatgcttctccaaaggggcctcgagcaacgcacatcaacctgcaacacatccgtaccgagtcattgagcagaactcgttcccgatcttcgacagagaatggggtgcggacgaggaactcttgctcctcgagggcgccgagatttacggcctgggatcgtgggcagacatcgcagaccacatcggcgggtatcgggacaaggacgaagtacgggatcactatctcaaagtctacattgagtcgtcgcgctttccccttccggagcgatgcagtccatacgatatggaactagcgaacgagatatccagggaggagttccaggcccgcaagaagcgcaggattgaggaacggagagaagctgccaagaacgcacccgctctgcagcccaagaccaagccgacagccagtgtgccagcttgtcacgagattcaaggctacatgcctggccgtttggagtttgagacggagtacgccaacgaagcagaggaggcagtacagctcatgcaatttgatcccggagacggcatcaacccgcgcacgggcgagctggagcctgagatggagctcaagcttacggtgatggatatctacaactgccggctaacgcagcgagccgaacgaaagaaggtgattttcgaacataacctgctcgagtatcgggagaacaccaagatggagaagaagcgatccaaagaagaacgggatctgctcaacaaggcgaaaccttttgcgcgcatgatgaaccgaaccgatttcgagcagttttgtcaagggcttgtggatgagctcaatcttcggcaggcaattgcgcaactgcaggaatggcgcagtctcaagattggcgacctccggagcggagaaaagtacgagcaagagaaggcgttgcggattcagaagtcgattccactggggtctatggaccgcgagagactcgcaaccaatcaacgcaacaagcagcagccaccgccagaaccgccgagcggcgcggcactcctagttgcacccgagttgcctttccgctcgacgacgacaaatggggcatcgactggcgaaggggcgaatggtgtcaaaaccgaaagcaatggcaatgttaacggcggaagtgtggtggtcgccaacggcgccccccctacaaggcagaaatacgtgccgcagccgattccgggagtccagccccttcagctcacccaggacaatgcaccggatctccatctcctgactccggaggaggtgaagctgtgcgaaacccttcgactccagcccaagccttacttaatgatcaaggagcagatccttaaagaagctctcaagggcaatgggagtctcaagaagaagcaagccaaggaaatctgccgtctggactctcagaaaggtggaaggatttttgatttcatggtgaatgctggctgggtggtcaaggcctga

SEQ ID NO: 3055 - protein, 522 aa, Myceliophthora thermophilia
MGVIRKKIAARGGEGGVKYVCDVCSADITSTVRIRCAHSACNDYDLCVQCFSKGASSNAHQPATHPYRVIEQNSFPIFDREWGADEELLLLEGAEIYGLGSWADIADHIGGYRDKDEVRDHYLKVYIESSRFPLPERCSPYDMELANEISREEFQARKKRRIEERREAAKNAPALQPKTKPTASVPACHEIQGYMPGRLEFETEYANEAEEAVQLMQFDPGDGINPRTGELEPEMELKLTVMDIYNCRLTQRAERKKVIFEHNLLEYRENTKMEKKRSKEERDLLNKAKPFARMMNRTDFEQFCQGLVDELNLRQAIAQLQEWRSLKIGDLRSGEKYEQEKALRIQKSIPLGSMDRERLATNQRNKQQPPPEPPSGAALLVAPELPFRSTTTNGASTGEGANGVKTESNGNVNGGSVVVANGAPPTRQKYVPQPIPGVQPLQLTQDNAPDLHLLTPEEVKLCETLRLQPKPYLMIKEQILKEALKGNGSLKKKQAKEICRLDSQKGGRIFDFMVNAGWVVKA

SEQ ID NO: 3056 - DNA, 258 bp, Myceliophthora thermophilia
atgggcgacgagttcgaaatgctttcctgtgtcaacgaactcagcaggctcatcctggagcccatcgttctcaaccccctccccgcggaggctaagttcaagttgaataaccagagactattaacaaacaggggaaacctgcaaaagttccgagtcaacagccgccaccacagccgggaactcgccgcagccgtactctcattggagcgcatctacatacaaatattccgcctggcccggcacgccaagccgccttag

SEQ ID NO: 3057 - protein, 85 aa, Myceliophthora thermophilia
MGDEFEMLSCVNELSRLILEPIVLNPLPAEAKFKLNNQRLLTNRGNLQKFRVNSRHHSRELAAAVLSLERIYIQIFRLARHAKPP

SEQ ID NO: 3058 - DNA, 6111 bp, Myceliophthora thermophilia
atggccgctttcacggccatcaatgtcgagccagaggagaacgttagcgaggagatagatacgaccaaggacctccaagttcgtttcctttatccgccgactgtctcgctcattgttcctaacactcctttccaggtcgacgatgccctgaagctcttccagaacgccctcaaactccatgcgcagggaccccagtatttcgacaaggccgccgatgcctacgatgcgctcttcgactccgaaatcttcaaatatccagaaagcaagaccgattacgaacgcttcgaggcaggccaagatgtggctcttgccaccgagtccgccttcgcccagggccttccgccgctcggcgcagatatcgacgggatagggagcagtcttccccaagcgctctatctatcctacaagaaccacggtcagttcgtcattgatcgcatcaagtacagaacccgcaagtctggctcgaggaaagaaaccctgctcgatgatcctgttgtggaggccgaggcgcacagagccttggacgacttttgtgcggccctggaccgcgatccctcggacgctgagctctggagaaaagccgctcgtgttgccgcatttttaaggagcgcgcgcattagccgctacagcttggaagccgccatcgaactggacgatgaccccgctgtcgaagaagtcgagccgccgtctctggccgagggttttgctggggagcagctcaaaaaccagcttcaggttctcggcgacgatatggcattgagccatccaatcatgaagcccttcctagatcgagaattgcccccgtatcttgctcgcttcaccgacccgatgccatttcttcccgaccctactatcacactggctgttcaacaaccacgtgggaaagaaagcgaagctcctcgcgttacaatctcactctctagtctgtcctggtctgaacttggcactgctatcgtgcggtttgttgcagaggagggacattcaggtcaggccatcgcaatccaacttcccgatacgggtaatgaggaggacgtccagatggaagttgacatgcccgaacaaccccgtgagtcgtcaccgcattcaatttcaccacaagaagccgtgaagcaggaagaggcagcggcagagcaacctggaggggaacagattgcgaaagagccaacgtctgcagcacttgaatcatctgccccggtcgacgagcagccagcgaaggaccggagcgctccctcgtcaagtagaaagcgctcacaatcggcagcgggtattcctgacgccaacgaagaagaaactgcggatgtgaagaggagcaagcggaccagacgacgagacactgctgcagaagaagccatggattctgctacatttctcgcaaaccaactccagccattgcaagcggccgaccaaaacctctttcagaccaccaaaaacctcttggaaaaccttggtgtgacggaccaagtgacacttgggcgaatcgccgaggtgctcgactcatgtgccgcggatgaccgaattggcaagattcaaaaacaagccaccgtcgatctccgtgactcaatcacacatttcgacgaggatacgggggcggtccttctcagcaagagagaacttcctcagtcaagcctttccgtctttctcgagcatgcaaggtcgggctcgcaacgggcccaggaggcgcccgcgtttgatgattccagaggcctaaaattttttgtcgagcgcgccaatagcggctggaataccgttcacgacatctcatatgaatacgttaacgctttggccaagctctacactggatacaaatggtcggatcagctgaagacggcagtggcggatgtcattagccaactggaaggcagcatctatgacaggtttatccatgaccttaacctatgtcagaaagatggggacggagaggaactcagtgacctctcaacgctcgctcagatgctgttcgagctctacctcgacatctacgaccacacgatggaccctaacagcacagcggagtcggcgagcccggatgcgcaggggcgagtggcgagatggatggacatatccactgaaatggtacggcgacgaaacccggaaccggatgatgctgtcgcgcttcgcctcctctgggccgcggtgtcctcgaccacacttgccaaggacacaccgagggaccatgtccttaactgctggcatagtcttcgtgacttccttgcccgttctggcgcgacagagattggccttcccaacagctccgtcatgcctgagatatctgttgctgccgccgaacgcgagatctccaagttgaccacaatggacttctttctgggccttttccaggatggtgaggggagcccagtctccgtaatcgagagcttggagcccgttctcaacccagagagcgtctacatcagtgtgccttcgatttctgatcggaaaggcgcaaataacgaggcttctagtgccaagcagcccaggcaacccatcacacagtgcgccagccaggagctcatggatttgtggaagttccttaagagcagcaatacagagctgcgcctcctcctctggtcgaggctcggagaggcctacggaaagatccggtatacgaccaagcagttttcgtgttttctccggagtatcgaaaccatcatatccgacttggagggcgatgactacatccactctccggatgaaccaagaaaaacccagttcatggcccttctgaaagctctagacgacctcatcatccagtcgctccacctagccctgaacgacaatagctcgttcgatattatcgacgacgatcacctaaggtcgagcatgtctgctctcgccaagatcagctgtatgctgcacgttgccgccatgtacgaggacgagatacgcctcggcatgaggcctgcgccatcgagcagttcaactttgaggtcattcctgaacaagctccaagagatgcaggtgcgaacctggtcgctccaatacaccatgctaaaggtcggactgaaccagcacgccgagctgttccctagaccggaaaacgaccttgctgattacttggctgcggtacaccaagttttgggtctccgcaagtgctgcaaatcctccaacaagatcttcctcaaaatgatgcgcgtggagcttctcaagcagaagaatatcgacaactgggaagactacctagggcaggtgctctacgatctccacggtctcaagcttggggtgggaatatgggaggttcaggaccacggatgcgagcccgagaacctggagaagcggcaggcgcttcagctggtcgagagggtcaccatgctggcaaacagaatgtcgatgaaagaccttcttaaatcggatcttaagacgacgattgagcggatgcaacaggcgataggctccgccaaatcgagcccccagatggcccacaaccttcgcaactactccgagtatctcaaatcaccgattcacccgttgcatctctaccaagccctgacgggcagcgtcgatctggacgcagtgaccatcaacacgcccgagagcgccccggcgaagcaaggatggttcttcttgcttggcatgattgccctcaccaagttcaagggcgtcgacctgaaccgtcgacagacgcccggggccactgatgatctacggatcggtgccacgttcctgcgtttacagctccagtacacgccggaccgttgggacgcctggtttcgcctggccgagtgcttcgactacgaactcgatgagtcggttctctggacggccgataagatgaacaaggaacgggccgagcttgtcaagttccagagaaacgctatccacagttacatcatggctctctctcactcgtacgcgtgggcgtcggatcccgctatcctcacctctctggaggacgatgaggaggcgctgtacgacatgtaccacgagtttgggatgcgcatgtactcgtcgagccgcgagccatttgccatggagcctttccagcatgctgaccagaagaggtttttcatagaggctgaaggtgccgggacgtacaagaagatcctgcacaatgaaatgacggactaccaagtctggaagtttgctgcccatctcttccgaaaggcaatggctggcaaacccaaagactggaagaacccgtacatgattgccaaatgcctctggaagatgtatcagaagccggtcgaagagttggacgagaaaaaccgccttcaccgtccgactgtcaagacgatcgtcaatgcgcttgagaagaccgtcgaggtcacctcgtcactgccgaagcctcgacatggtcaggatccgattctggagccgcactacaagattgtttcggtcatccacaagctcgtgacgcggggcgaccttgagattcaagaagccgcccgcatcctccagcgccaaccatatgcgccagaccgcggtaaggaggtgcccatcgagaatgccgaggattgggaagcctacgtgatccgatgcctgcggtaccttagggacaaggacaagtccaactggcagcaccgcatcgtcatgaggcacgcccgcctcctgtttgatgagaactccgaccccggcggcagtggaagctaccttgccgccaaggccgccttctacgtgctgcgggagaacatgttcaccaaaaccatggtgatgaatgtttggaagtgcgacgccgagcggccgggccgtcatcatgtatacacggagcgctatatccgatacatggtccggctactggacgttatgaacgaccgcgtcagcctcgaggccgtgctacgccgcatccgcaagaagggtgccgacttttaccacttcaacgagctctggcagtactgcgtcctcacctacattaagctcctccgccaaacgtttgaaataacgcccgcggaggaggacgctttcaagacactcagtcaggaagagtttgacgtcgtcggcgagaagattaccgagtggtctaccacgcctgcagctgaaaaccaccgcgcgctcacggccatgaaagaggccgtcgagctcaagaagctcaacgcaaacctcatgaaagccagccctattgatgacctcatcacagactgctattcaatcatctaccaacacttcaagtccgatctccccgaccccaatcagcaagaatcccaaccggcagaaggtaccgagcccaaggcagagacggatctcaaacccagcaacctcctccacgcgcttgttacccgcgacaaggacaacaaggacaagtcaccttctgtcctgggctctctccgcgcaggctcggaacagcccgacagggaacgatcagaaagaccctcactcgcgggcgaccaaccgccccgcgccgcggcgtcagggcgcgtgggaggcggcatacgccgacccaatattttgcgcaaggctgagcaggccgtgcaagccgtgcttcgggcagcagaggcgccgcccaaatcggcgggaggaacggcggcggcgggaggagccagcggtgcaggaactggcgcggtcaagacgagcagatctagggtcgggagtgtctcgagtgcgcgtgctgcgggccgtgaccgcgaggacggcagtcaggaggagagtggagaagagggcgagggggagggagaagacggggaccaagacgcggagatgaagggcgcagctgatggcggggaaggggccaaaacagctgggagggggacggtggcaggggagcaagagagtgacgtctcttctccgcccggtagtgtgcatgactcggcggacgacgagagcgagctgagtgatgtgccagctgacgacgaggatgatacaccaccgctgctgtttccaaatctcaggcggagcgcggacaacacgggaaccgggaaggaggcggacgaagagagcaccgaggacggtgctgacgaggaaggtggggaagaggacgaaccggaggacgaacacggggcagagagtggtgaggaggatcaggaagaagctacgcatgaaggagacaatgagacagaggaggaacttgaaccggaaggagagggagatgaagaaggggctgaacctaccccggcagctccggaggtcaaggacgttgatgctccggcggaggaggaggaggaggaggaggagagaggagcatga

SEQ ID NO: 3059 - protein, 2036 aa, Myceliophthora thermophilia
MAAFTAINVEPEENVSEEIDTTKDLQVRFLYPPTVSLIVPNTPFQVDDALKLFQNALKLHAQGPQYFDKAADAYDALFDSEIFKYPESKTDYERFEAGQDVALATESAFAQGLPPLGADIDGIGSSLPQALYLSYKNHGQFVIDRIKYRTRKSGSRKETLLDDPVVEAEAHRALDDFCAALDRDPSDAELWRKAARVAAFLRSARISRYSLEAAIELDDDPAVEEVEPPSLAEGFAGEQLKNQLQVLGDDMALSHPIMKPFLDRELPPYLARFTDPMPFLPDPTITLAVQQPRGKESEAPRVTISLSSLSWSELGTAIVRFVAEEGHSGQAIAIQLPDTGNEEDVQMEVDMPEQPRESSPHSISPQEAVKQEEAAAEQPGGEQIAKEPTSAALESSAPVDEQPAKDRSAPSSSRKRSQSAAGIPDANEEETADVKRSKRTRRRDTAAEEAMDSATFLANQLQPLQAADQNLFQTTKNLLENLGVTDQVTLGRIAEVLDSCAADDRIGKIQKQATVDLRDSITHFDEDTGAVLLSKRELPQSSLSVFLEHARSGSQRAQEAPAFDDSRGLKFFVERANSGWNTVHDISYEYVNALAKLYTGYKWSDQLKTAVADVISQLEGSIYDRFIHDLNLCQKDGDGEELSDLSTLAQMLFELYLDIYDHTMDPNSTAESASPDAQGRVARWMDISTEMVRRRNPEPDDAVALRLLWAAVSSTTLAKDTPRDHVLNCWHSLRDFLARSGATEIGLPNSSVMPEISVAAAEREISKLTTMDFFLGLFQDGEGSPVSVIESLEPVLNPESVYISVPSISDRKGANNEASSAKQPRQPITQCASQELMDLWKFLKSSNTELRLLLWSRLGEAYGKIRYTTKQFSCFLRSIETIISDLEGDDYIHSPDEPRKTQFMALLKALDDLIIQSLHLALNDNSSFDIIDDDHLRSSMSALAKISCMLHVAAMYEDEIRLGMRPAPSSSSTLRSFLNKLQEMQVRTWSLQYTMLKVGLNQHAELFPRPENDLADYLAAVHQVLGLRKCCKSSNKIFLKMMRVELLKQKNIDNWEDYLGQVLYDLHGLKLGVGIWEVQDHGCEPENLEKRQALQLVERVTMLANRMSMKDLLKSDLKTTIERMQQAIGSAKSSPQMAHNLRNYSEYLKSPIHPLHLYQALTGSVDLDAVTINTPESAPAKQGWFFLLGMIALTKFKGVDLNRRQTPGATDDLRIGATFLRLQLQYTPDRWDAWFRLAECFDYELDESVLWTADKMNKERAELVKFQRNAIHSYIMALSHSYAWASDPAILTSLEDDEEALYDMYHEFGMRMYSSSREPFAMEPFQHADQKRFFIEAEGAGTYKKILHNEMTDYQVWKFAAHLFRKAMAGKPKDWKNPYMIAKCLWKMYQKPVEELDEKNRLHRPTVKTIVNALEKTVEVTSSLPKPRHGQDPILEPHYKIVSVIHKLVTRGDLEIQEAARILQRQPYAPDRGKEVPIENAEDWEAYVIRCLRYLRDKDKSNWQHRIVMRHARLLFDENSDPGGSGSYLAAKAAFYVLRENMFTKTMVMNVWKCDAERPGRHHVYTERYIRYMVRLLDVMNDRVSLEAVLRRIRKKGADFYHFNELWQYCVLTYIKLLRQTFEITPAEEDAFKTLSQEEFDVVGEKITEWSTTPAAENHRALTAMKEAVELKKLNANLMKASPIDDLITDCYSIIYQHFKSDLPDPNQQESQPAEGTEPKAETDLKPSNLLHALVTRDKDNKDKSPSVLGSLRAGSEQPDRERSERPSLAGDQPPRAAASGRVGGGIRRPNILRKAEQAVQAVLRAAEAPPKSAGGTAAAGGASGAGTGAVKTSRSRVGSVSSARAAGRDREDGSQEESGEEGEGEGEDGDQDAEMKGAADGGEGAKTAGRGTVAGEQESDVSSPPGSVHDSADDESELSDVPADDEDDTPPLLFPNLRRSADNTGTGKEADEESTEDGADEEGGEEDEPEDEHGAESGEEDQEEATHEGDNETEEELEPEGEGDEEGAEPTPAAPEVKDVDAPAEEEEEEEERGA

SEQ ID NO: 3060 - DNA, 546 bp, Myceliophthora thermophilia
atggcgtcttcaaataagcgcattgccaaggaactagcagagtgcaccggctcgccgcctccgggcatctccatcacggtcccagacgagtcggacctgcacacctggcacgtcatcctggaggggcccgagaacacggtgtacgcgggcgggcgcttcgggctggtggtgtcgctgccgcccgactacccgttccgggcgccgaccatcacgttcgcgacgcgcatctaccaccccaacgtgaccaacgacagcctgggcaacatctgcctgggcccgctcaagcccgagaactggaagccgtcgacccggctggccggcgtgctcgaggccgtccgccacctcctggtcgagccccagccggacgacccgctcgaggcccgcatcgccgacgagtaccgcgccgaccgcgccgagttcgacaagaacgcgcgcacctacgtccagcgctatgcgaagggcccggtcaagttcgatagcgcgaccccgaccacctcggccaagccggcggaagaaaagaaggccggttccggcgggagttcatag

SEQ ID NO: 3061 - protein, 181 aa, Myceliophthora thermophilia
MASSNKRIAKELAECTGSPPPGISITVPDESDLHTWHVILEGPENTVYAGGRFGLVVSLPPDYPFRAPTITFATRIYHPNVTNDSLGNICLGPLKPENWKPSTRLAGVLEAVRHLLVEPQPDDPLEARIADEYRADRAEFDKNARTYVQRYAKGPVKFDSATPTTSAKPAEEKKAGSGGSS

SEQ ID NO: 3062 - DNA, 933 bp, Myceliophthora thermophilia
atgactgtctttaaccaaggatgttctgacagcatgatggtcacgtatcccacaaagggcacgtatccaacaacgctcctgagagcacatgtcagcttccaaaatgcgagcacaggctcggatgcggtgaacttacccgacgatgtctttcctgttcagataatcctgcccgcgagcgtagagttcggtatcatctgctgcattgttgtctccctttacgaacccagtcccaaactttctcactacccggtggacgatggggatgtcctttcccttcacattgtacacaacaacctcgccgacgttggtctcggacatgagattgcgattccagaggagaagcaggtcgccacgctggaatgcgggttccatgctgccagacaagacgacgacaatcggggagggggagtctgtgatgaccgaaagacctttccacatctgcggcaggaagtcagccatggacaagacgagccggaccgaaatgtccacggaagctgcggacacgagaaggaacctaccatgaatgccgacgataggattagcccaaagttcatgagctgcgccgcagcttgccgcgggttccctaagctggacagcatcctaaaaggctatgtcgtagttgttagaggccgggagcgaggttgtggtgcgaagttgttgcggctctccgaagcgctgttgacaggcgacggatgcgatgtggtgtcggcaagcagcagtgaccaccgtgttgaattggcgtccggtgattgggatgcacccaaaaataatgtggggcactggtgggtccacaccaagcttgcagaacaaccccacttctccagatgtataacatcaccagatgcagtatgtacggcacctttgcacattgacagctttctttgtagagagcattttatcggcttaagtagctacacttttaacccattgtga

SEQ ID NO: 3063 - protein, 310 aa, Myceliophthora thermophilia
MTVFNQGCSDSMMVTYPTKGTYPTTLLRAHVSFQNASTGSDAVNLPDDVFPVQIILPASVEFGIICCIVVSLYEPSPKLSHYPVDDGDVLSLHIVHNNLADVGLGHEIAIPEEKQVATLECGFHAARQDDDNRGGGVCDDRKTFPHLRQEVSHGQDEPDRNVHGSCGHEKEPTMNADDRISPKFMSCAAACRGFPKLDSILKGYVVVVRGRERGCGAKLLRLSEALLTGDGCDVVSASSSDHRVELASGDWDAPKNNVGHWWVHTKLAEQPHFSRCITSPDAVCTAPLHIDSFLCREHFIGLSSYTFNPL

SEQ ID NO: 3064 - DNA, 4179 bp, Myceliophthora thermophilia
atggagggccagtacaatggcgcaggcgacggcaataatagcggtggtgcccacgagatgaagcagttcgagcaccggaacctccgggttggcgccgggcctcctgcggccaccaccaccaccaagggcaactttgcaggcaatgcgcgccaatggtaccaccgactggtcgtcggtctcatcctgcggcgcaagacgctgccgccatccagggacgggcggcgcattcccttgcggccggaccgcgaggagccgctcatcgatgagaggaggggctatccgtacatttccaactccatccggacctcgcgctacaccgtctacgacttcttccccaagcagctcttcttccagttcacccggctagccaacttttactttttatgcgtcggcattcctcagacgatcccgggaatcagcactaccggaaacttcaccaccatcctcccgctcctgttcttcgtcctcctcacgattgccaaggagggctacgacgactggaggaggcatcgcctcgacaagattgagaatgccaagccgacaaccgtcctgcgccgcgccggtagcagcatcggaaccagccaggggtggaggccatggttttgcggaaggccaaccaacaagctaggcgtgtttgagcagcaatccgaaacgggccagatttctcctctcgggttgcaatggcaaaccatcaagtggcaggacctgcgagtcggagacgtcgtcaagttgtccagggatgaggacgtgcccgccgacattgtgctcctccatgccgagggcgagggaggcttggcttatgtagagaccatggcgctcgacggggagacgaatctcaagagcaagcgagtgtgcgccgccttggaggggtgtgattctgtcgaaggcatctgcaactgcgacgccgtgtttgttgtcgaggatccgaacccggacctgtatcgcttcgacgggcgggtgacggtcggagaagagaccctgcctctcacgctgaccgaggttgtctaccgtggttgcaccatccgcaacaccgccagcgtcatcgggatggtcatcaacacgggggaggagacaaaaattcgaagaaacgcgaatcgccacccgagtgccaagaaacccgccctagagagcacggccaacatgattgtcctcgcgctcgtcgtctaccttgttgccctcgttgctggtctctcagggggttacgccatctggcaacacacctacgagcgggttgcatggtacctccgcgatgttccggttccctactcgcatattatcatggggtatgcgatccagttcaacaacgttatccctctggccctatatgtcagccttgagattgtcaagatctgccagatgctgctgctgaactcagacattgagatgtacgaccaggcgtcggataccgccgcgcgatgcaacaccaacactatccttgagaacctcggacaggttggctacttattttccgataagaccgggaccttgacggagaacgtcatgcgatttcgcaagatgagcgtggccgggacgacttggctgcatcagatggatcttgttcaaggcgatggctccaagaagctcggagaaccacaacaggtcggctgtgagatgttgggtgcaacccttgaacacggcgatgacactcccagcggtgccgaggtttcaaggttcttgtctcttccgacaccgaatgaagacgcctctatttgccggtcttcgtcccaattgcggtcaaccttgaggccggaccacatccagcctaacctcacgacctcggatctactagaatacatccggatacggccgaattctcccttttctcagcgtgccattcaatacattctggtgatggcgctctgtcacacctgtctccccgagtctaaggacggaaaggtcgactttcaggccgcgtcacccgacgagcttgctctggtaagggcggcccaagatctcggtttcctggtcacgcagagaacgacgcaaagcgtgactctccgaatctccaccggcgacggccacacagaacgcacctaccgcatccttgacgtgatcgagtttagcagcaaacgcaaacgcatgtcaataatcgtacgctgccccgacgggaggatatggctcctgaccaagggcgccgactccgtcatcctcccgcgcttgagactggcaaacctggcgacgcagaaggccaaggaagtacggcaaagcctcgagttcgaacatcaactactccgcaagagcgaggctcaagaaccccgcaacagcttcggcggccgaccaagccttactatccggcggagtctcgccctctcacggcacggctccctggttgccagcagcagtgtgcgaccggataagagcagaagcaagtcgtttgaccttcgccgtctagaccctcagaccaatgtcctctctcgccccctgctcgatgcccgcacggtgtccttcgacggccgccgcacaacgaggagggatgcctcagagccacaggccacgcctaccaagtttgcattcctcgaggacccgtcattgtccgacgatgctaccatcttcactcgctgtttcaggcagatagacgaatttgccacggagggtcttcggacgctcctgtttgctcaccggtttctgaccgagcaggagtacaacggctggaagaagctgtaccacgatgcggagaccagcttggtcgaccgccaagaccgcatcgaagccgtgggcgagatgatcgagcagtcgctcgatctcatcggcgcatccggcatcgaggaccagctgcagcccggggttcccgaaacgattgaacggctccggcgggcaaacatcaagatctggatgctcaccggagataagcgagaaacggcaatcaacattgcccattcggcccggatctgccgtcccggatccgacgtcttcgtgctggacgcgaccaagggcgacctggacggccagattctgaccatcatggaagaccttcagatccaagccgagaccaacccgtccaacctcccgggacacacggtcgtctcctcattctaccgtctcatccgcaccatcgactcggtcatctgctgccgcgcgtccccgtcccagaaggcgctcctggtccggacggtccgcaacttctcgtcgtccgccagcatcgctcctcccgccgccgccgccgggaaggggaggggagggaccccgcttctgcacgacctcgtcgctcgcctccggcggcggctgctgccgttgcccagcgcgagcgcgggcccgctgacgctcgccatcggcgacggcgccaacgacctggccatgctcatcgaggcgcaggtcgcggtgggcatctcgcggcgcgagggcctgcaggcggcgcgcagctggagcctgacggcgctcaacaccctcttcaccagcctctgcgtcatcgtgccgggcgtgtgggagcaggacctggcggccgagacgctgctggccgtgccggagctgtacgtgtttgggcagcgcgaccgcggtctgaatccgaaaaagtattttggctggatgttgggcgccgcggtcgagggggtgctggtctgggtcctgtgctgggccgcgtacgggggcgcgatggggccggtccgggatggcggcttgtttgcgctgggcgatctggcgttctcggtcaacatcatttggacaaacctgaagcttctgattctggacacgcactacaagacgggcatcgtcatcgggtccttcttcatcaccgtcggcggctggtggatatggcaggtattccttgccggcgtgtatgcccccggggtgtggccgtacgcggtcaaggacggcttcttctcgtcctttgggccggatccggcctggtgggccgcgctgtttggcgccctcggcgtcctggcctgcatcgagctcgcatacaagtcggtcaagcgcaacctgatcgtcgcggggctctggaagtttggctggaagtggctgaggtggtctacgtggaaggcggcgttcagtagaggcgccgccgcaaggacggaggaaggcactcgcgcaagcttggaggagtgggacgtggaactgtggcaggtcatggagcaggatccggcaatcagggaaacgctacgcaggatgagcaggttgggattcgccgaggagaatgaagggccggagagcgcgtggagaggagacggcagtgagcccgtctaa

SEQ ID NO: 3065 - protein, 1392 aa, Myceliophthora thermophilia
MEGQYNGAGDGNNSGGAHEMKQFEHRNLRVGAGPPAATTTTKGNFAGNARQWYHRLVVGLILRRKTLPPSRDGRRIPLRPDREEPLIDERRGYPYISNSIRTSRYTVYDFFPKQLFFQFTRLANFYFLCVGIPQTIPGISTTGNFTTILPLLFFVLLTIAKEGYDDWRRHRLDKIENAKPTTVLRRAGSSIGTSQGWRPWFCGRPTNKLGVFEQQSETGQISPLGLQWQTIKWQDLRVGDVVKLSRDEDVPADIVLLHAEGEGGLAYVETMALDGETNLKSKRVCAALEGCDSVEGICNCDAVFVVEDPNPDLYRFDGRVTVGEETLPLTLTEVVYRGCTIRNTASVIGMVINTGEETKIRRNANRHPSAKKPALESTANMIVLALVVYLVALVAGLSGGYAIWQHTYERVAWYLRDVPVPYSHIIMGYAIQFNNVIPLALYVSLEIVKICQMLLLNSDIEMYDQASDTAARCNTNTILENLGQVGYLFSDKTGTLTENVMRFRKMSVAGTTWLHQMDLVQGDGSKKLGEPQQVGCEMLGATLEHGDDTPSGAEVSRFLSLPTPNEDASICRSSSQLRSTLRPDHIQPNLTTSDLLEYIRIRPNSPFSQRAIQYILVMALCHTCLPESKDGKVDFQAASPDELALVRAAQDLGFLVTQRTTQSVTLRISTGDGHTERTYRILDVIEFSSKRKRMSIIVRCPDGRIWLLTKGADSVILPRLRLANLATQKAKEVRQSLEFEHQLLRKSEAQEPRNSFGGRPSLTIRRSLALSRHGSLVASSSVRPDKSRSKSFDLRRLDPQTNVLSRPLLDARTVSFDGRRTTRRDASEPQATPTKFAFLEDPSLSDDATIFTRCFRQIDEFATEGLRTLLFAHRFLTEQEYNGWKKLYHDAETSLVDRQDRIEAVGEMIEQSLDLIGASGIEDQLQPGVPETIERLRRANIKIWMLTGDKRETAINIAHSARICRPGSDVFVLDATKGDLDGQILTIMEDLQIQAETNPSNLPGHTVVSSFYRLIRTIDSVICCRASPSQKALLVRTVRNFSSSASIAPPAAAAGKGRGGTPLLHDLVARLRRRLLPLPSASAGPLTLAIGDGANDLAMLIEAQVAVGISRREGLQAARSWSLTALNTLFTSLCVIVPGVWEQDLAAETLLAVPELYVFGQRDRGLNPKKYFGWMLGAAVEGVLVWVLCWAAYGGAMGPVRDGGLFALGDLAFSVNIIWTNLKLLILDTHYKTGIVIGSFFITVGGWWIWQVFLAGVYAPGVWPYAVKDGFFSSFGPDPAWWAALFGALGVLACIELAYKSVKRNLIVAGLWKFGWKWLRWSTWKAAFSRGAAARTEEGTRASLEEWDVELWQVMEQDPAIRETLRRMSRLGFAEENEGPESAWRGDGSEPV

SEQ ID NO: 3066 - DNA, 450 bp, Myceliophthora thermophilia
atgggcccgacagctacgtcgagtattttgacgactagcaactcagccacgacgtacggaacccggaataccagttcatgcgcacgaaccgtagaaaagacgaacgtatgtgggaaagctactagaagaaacactcctatatcagcattggagtacccacggcccacgtacagtgggaaggatttggaaaagagttctaataccttccaggcaacgccacgtgactgcacccgcgatacgaggcacatgcgcaagtgccctggttccagtgtgtggcacacgaatgccgataccacttccgcgacaaattcgaaaacaatcactggccgacctgacaaggaaatgaggacggaagcttacaccctgtggaatgggtctatgatgcaggaaacagagcagccgaattgctctggaagatcgaagcccgtaattcagaaggcattacgatag

SEQ ID NO: 3067 - protein, 149 aa, Myceliophthora thermophilia
MGPTATSSILTTSNSATTYGTRNTSSCARTVEKTNVCGKATRRNTPISALEYPRPTYSGKDLEKSSNTFQATPRDCTRDTRHMRKCPGSSVWHTNADTTSATNSKTITGRPDKEMRTEAYTLWNGSMMQETEQPNCSGRSKPVIQKALR

SEQ ID NO: 3068 - DNA, 846 bp, Myceliophthora thermophilia
atggcggctctacgcgtagggcggccgcctagcaattctagcgttctgctcgtagatcatccgctccaggtcccccgtataccggtagggagcggcgttaacgtgctggtcggagtagcggcttcgaggtttaggctcctcgtaatacagatgcgggatagcgttaaagttaggtacaagccttgtatagtgactgatgaggtacaatggaacaaaacagcgctagacctcgacaaagtcgaagtttatagtcttgagcagattgcttgggattatccccctcttagctccgataagagctctagcgacggcatagataaggactccggcggcggctctagtaatggctccagtgacagcatagacaaagactccagctctagtaatggctccggtgacggcatagacaaagactccagctctggtaacggctctggcgactgcatggacgaggactctagcggcggctctggtgatggctctggtgacggccctagtcccggcttagtttcggactcaaattcgacgacaacgagactcggcatacttgcctataatcaagaggggccttggccaagcgaagctcaaatagaaagtttccgatcttgtagattggtttacgtcggtagccaagagttagaatatccccgtcggtcctgccctcgtcttcttcgactcctatctatcctcgccaaagctggacttcgtagcctatcttctcgacaaggatggctgccaagaaggaagcaagctgccaagcgccttgaccatctctggtcccttgccttagactcgcccgaggccatggctacaaccatagcctcgtccgatccgaccgccgcctaa

SEQ ID NO: 3069 - protein, 281 aa, Myceliophthora thermophilia
MAALRVGRPPSNSSVLLVDHPLQVPRIPVGSGVNVLVGVAASRFRLLVIQMRDSVKVRYKPCIVTDEVQWNKTALDLDKVEVYSLEQIAWDYPPLSSDKSSSDGIDKDSGGGSSNGSSDSIDKDSSSSNGSGDGIDKDSSSGNGSGDCMDEDSSGGSGDGSGDGPSPGLVSDSNSTTTRLGILAYNQEGPWPSEAQIESFRSCRLVYVGSQELEYPRRSCPRLLRLLSILAKAGLRSLSSRQGWLPRRKQAAKRLDHLWSLALDSPEAMATTIASSDPTAA

SEQ ID NO: 3070 - DNA, 765 bp, Myceliophthora thermophilia
atgccgaatcacacgtcccccgttgccatcgaggtgctgtacgttgacaaggcaaacaaacgcctacaagtctgcgaagcacttaagggaggccacgtcaagacggctatcacggtcatagctgacgacgatgatgataggatgggcggagttgggacgtgccagcgggtgaagcgtgtcgtctgcgggggcgccgcgactcgtatatttaactggctcggggccgcgtacattgagcgacgtaactttgagatctcagcaacgcacaacatcgacggcggcacgtcatgcatgtccggccgtacgggcgcctaccgcaccgagattttgaagagctacgatttcttaaggagcttcaagaacgagaaatggggaaggtgtaggcttaatgccgacgacgacaactttataacgcggtggctcgtagcctaccagtggaaaacatggatacatgcacgagagatacgtctggactgcacgtacgcgctgcatattgccactttcacctcgctcgcctttgtggtcgacctgctcttgctcttcacgtgctggtggtgtacagaagactggcagcctagaaaccggcgcatcctactcggggcagaggtcgcgttcatgttcggcttcaccaaagtggtaaaactggctgggctgcttcgcagaaatcctcgtgacatcatattcctgccggtatccatcttgtttggctacttccatggtctgatcaagctctatgcgctatgcacactcaaagagacgtcctag

SEQ ID NO: 3071 - protein, 254 aa, Myceliophthora thermophilia
MPNHTSPVAIEVLYVDKANKRLQVCEALKGGHVKTAITVIADDDDDRMGGVGTCQRVKRVVCGGAATRIFNWLGAAYIERRNFEISATHNIDGGTSCMSGRTGAYRTEILKSYDFLRSFKNEKWGRCRLNADDDNFITRWLVAYQWKTWIHAREIRLDCTYALHIATFTSLAFVVDLLLLFTCWWCTEDWQPRNRRILLGAEVAFMFGFTKVVKLAGLLRRNPRDIIFLPVSILFGYFHGLIKLYALCTLKETS

SEQ ID NO: 3072 - DNA, 213 bp, Myceliophthora thermophilia
atggcaatgccgctccaactccggtcgcctgcccgagccttcctcagagacctctcgcgcttgacacctcttgcgcgctctccccaaggggcaagctcccggcggaacattctctcggttttcagggttgtagaagtggatggagtgccctggcgttactcggaatcgttgcgcgactcgcttaacaattccgtacgtgtcgcgacttcatag

SEQ ID NO: 3073 - protein, 70 aa, Myceliophthora thermophilia
MAMPLQLRSPARAFLRDLSRLTPLARSPQGASSRRNILSVFRVVEVDGVPWRYSESLRDSLNNSVRVATS

SEQ ID NO: 3074 - DNA, 1443 bp, Myceliophthora thermophilia
atggcttcatcttcggacttcgacttacccatggggcgctcgcagagaaatgctccaaccgacgagcagtcacggctcgagggcacccaagatgtcacagtggaagccgacgcatcccaggatggaaagaagaagaagaagaacaagaagcgtagcgccggagcgaagaaacgtggcactggatttgaggaattctactgcgatccgcccatgactccggccgagtacaacgaagaaagggatgtcatttacccaccgcatcgccctttcgttgatcgcattgaggagtgcatccagcggtaccgtgcccgccgccggctcaactcagaccgcgagtatctcttctccagatacctcctcctgggaggcattgacgcctctgttcgacagtttcaaagcacccgtaccatcggagacgatattcttgaggatgctaccaaaaactccattcgcgaaatgaccgccgacgatgtgattcagcgcggcggggacggaaaccgaaacccacggttttacaacccgaactatccggaacactgggacgtcgacttcacgggcgttgccgctggttttgtatctgaacaccttcccgccctgactggccctgaaaccgaccagttcttcatgggtgtcgacgtggtcctcaattttctcaagtacgtcgatctccacgacgtgtgccccgagtatgccgacgacatcaagaatgcgcaaagggtgtgcttaagggcgctggaagaaatcccggccacgacaaaactgctacaactacttcccggtcagttcaatgccgcactcagggtgctgtatgtcagccaagatgacggctcctcaggcgttgataactactttgagaaggcattgccagatccaaagcaggctaaagtgagccacgcagctacgatctcgattctgatgggagccgaccggtttccaaccaacagcgaatggttcgtcaccgacacggccgaattcaccttcgaggtcctcgccatcaagctcccaacagatgccattcgggcaaagtacaaggccattaaccaacatctcaccggctattctgatatccagccttgcggcactattatcgcccgcccagtgattgtgcgtgacggctgggacaacacgatggcggcgaccatccctccggaggctgacaaagaaagcgaatttatccttgaagaggacatcctccgcctgctggtggtgggtatgaagttgaccattggagtttgcacgctgaacgttgggctcaagttcatcaaatacgtgacccaggtccggccgagcttttacgtctttttaccccaagaactgatgttccacttcaaggaacctgttccaaatgaccgtccggcgaagagcatatacgactgcgaggacgaggccgacggcgacgctccagctggaggttacaacgacgggggagatgtagagagctga

SEQ ID NO: 3075 - protein, 480 aa, Myceliophthora thermophilia
MASSSDFDLPMGRSQRNAPTDEQSRLEGTQDVTVEADASQDGKKKKKNKKRSAGAKKRGTGFEEFYCDPPMTPAEYNEERDVIYPPHRPFVDRIEECIQRYRARRRLNSDREYLFSRYLLLGGIDASVRQFQSTRTIGDDILEDATKNSIREMTADDVIQRGGDGNRNPRFYNPNYPEHWDVDFTGVAAGFVSEHLPALTGPETDQFFMGVDVVLNFLKYVDLHDVCPEYADDIKNAQRVCLRALEEIPATTKLLQLLPGQFNAALRVLYVSQDDGSSGVDNYFEKALPDPKQAKVSHAATISILMGADRFPTNSEWFVTDTAEFTFEVLAIKLPTDAIRAKYKAINQHLTGYSDIQPCGTIIARPVIVRDGWDNTMAATIPPEADKESEFILEEDILRLLVVGMKLTIGVCTLNVGLKFIKYVTQVRPSFYVFLPQELMFHFKEPVPNDRPAKSIYDCEDEADGDAPAGGYNDGGDVES

SEQ ID NO: 3076 - DNA, 966 bp, Myceliophthora thermophilia
atggccgccctcgacgcgcaaaagtacacccccaccgaggagtccgagatccaggcgtggctcgacaaggccgcctccatcaaggctggtgcttccgacgccctcctcgactccctcaatgccgacctcgcgacccgcaccaccgccatcggcaccaagcccagcaaggccgacgttgccctgtacgagtcactcgccccgctcgtcaagtcctggaccccggagcagcgcaccggccagaacggccgccccaacatcgtccgcctcgtcgatttcgtccagaacagcccgctcttcggcctcaacgtcgccgacgccgacaaggtgcaggtcgatgccgaggagatcctctacgtcaagccgcccgtcgacgccaaggccgagaaggagcggctgaagaaggagaaggccgctgctgctgctgcggcggcggggggcgtcggcgccgatggagacaacaagacgctcgtggatcggacaaaggaagccgccggtgtggtggcggacgaggccgccgaggtgaaggacaaggcggcggcggcggtcgcgggagaggccggcgcggccgccaagaagcagaagaaggagaagaaggagcgggcgcccaagcagccggcggccccggcggccccggcggtgctgtctccctgcctgatcgacctccgcgtcggccacatcctcaaggcgatcaagcaccccgaggccgactcgctctacgtctcgagcatcgccatgggcgacgcgcccggcaccgacgacacgtccgagtacgagggccaggtggtgcggaccgtgtgctcgggcctcaacgggctcgtcccgctcgaggagatgcagggccgcaaggtggtggtggtgtgcaacctgaagcccgtcaagatgcgcggcacccccccccccccccccccccccccaccttttcctgttcatgttattcttttcccttccttctctaagccacagtaa

SEQ ID NO: 3077 - protein, 321 aa, Myceliophthora thermophilia
MAALDAQKYTPTEESEIQAWLDKAASIKAGASDALLDSLNADLATRTTAIGTKPSKADVALYESLAPLVKSWTPEQRTGQNGRPNIVRLVDFVQNSPLFGLNVADADKVQVDAEEILYVKPPVDAKAEKERLKKEKAAAAAAAAGGVGADGDNKTLVDRTKEAAGVVADEAAEVKDKAAAAVAGEAGAAAKKQKKEKKERAPKQPAAPAAPAVLSPCLIDLRVGHILKAIKHPEADSLYVSSIAMGDAPGTDDTSEYEGQVVRTVCSGLNGLVPLEEMQGRKVVVVCNLKPVKMRGTPPPPPPPPPFPVHVILFPSFSKPQ

SEQ ID NO: 3078 - DNA, 870 bp, Myceliophthora thermophilia
atggctcccccatccacatcctccctctcctccctcccaccgcccccgccagttcccaacgtgcagttgtcactcccatccccacacgtcctgctcgtcactctcgaccgcccgcgcgccctcaacgccatccccgccgcccagaaccaggccatggccgcgctctgggcctggtacgacgcccagccgcagctgcggtgcgccgtcctcacgggcggggacggccgcgcgttctgcgcgggcgcggacctgcgcgagtgggaccagcgacataccgctgatgacgagaacaacaacaacaacaacaacaacgagaacaacaccgcgagcgaccgccaggcggtggacaaggcctgggaggcggcgcgggcccgggagctgtggacgcgggaggggttcggcgggctgtcgaaccgggcgggcaagaagccggtgatcgcggcggtgaacgggctgtgcctgggcggcgggatggagatggtggtcaactgcgacctggtggtggcgaacggcgcgcgggcccgcttcgggctgcccgagcgggcggccgagatggcgctgctggggcggatcggctacacggccgagcagatgcgcgactggggcatcgtcaacttcgtcgtcggcgagggtaaggccgtccaggaggcggtcaagatcgccgaggagatcgcgaacaactcgcccgacgccgtcatcgcctccagggagggactgcggctcgggtgggagcccctgggcccccagctggggaccgaggtgctggagaagggcgtgtatggcaggatcgacggcggcgagaacatgaaggagggtctcaggagcttcgtcgagaagcggaagccggtttggaaggatagcaagctatga

SEQ ID NO: 3079 - protein, 289 aa, Myceliophthora thermophilia
MAPPSTSSLSSLPPPPPVPNVQLSLPSPHVLLVTLDRPRALNAIPAAQNQAMAALWAWYDAQPQLRCAVLTGGDGRAFCAGADLREWDQRHTADDENNNNNNNNENNTASDRQAVDKAWEAARARELWTREGFGGLSNRAGKKPVIAAVNGLCLGGGMEMVVNCDLVVANGARARFGLPERAAEMALLGRIGYTAEQMRDWGIVNFVVGEGKAVQEAVKIAEEIANNSPDAVIASREGLRLGWEPLGPQLGTEVLEKGVYGRIDGGENMKEGLRSFVEKRKPVWKDSKL

SEQ ID NO: 3080 - DNA, 2268 bp, Myceliophthora thermophilia
atggcgtacaatccctacggagtgcctccttatggagctcctccggtttacccatcgtaccctggggcgtcgcatccgccggggatggcaccgccaccgggcttaggtcctcctccaggcatgtcctctgcccctggaatggcaccgcctcctggtgtccagccgcccaatagtgccacacaagctaatcgaccaagcggccttcctgcgtccttccaaccgccaccgaacctacccaacatcaacttcaacgccccggtgatccgcttgggcgccagcatgccgccggcgaaaaccggttcgtcaatcagtagcgaccgcaaggactcgcacaccccgacatccggcaggcccggtcttggagccgaccgtgcggatcagtcgcgcggccaaacgagggagagcatgcagtcgttgattccgcccaccgcggaggagcggctccgaacaatctttgtccacaagatcccggagggtgttggcggcgaggcgggcatccagcagctgctcagcacggtcggcaggctgcggcggtgggattcaggacagtcgcatctgtcggagcacaagggggccctgtttgggttcgcacagtacgaagaccccgaatcgctagccgctgcagtcgagttactcaaagacatcgaggtgcccgtgaagaagcaatccccgaccgagaacccgccggccgacgacgacgacaagttcgaaggcattgacaaggaaaagctcaaggtcgaggtggatccgagcaccgtcaagtatttagagtcctggaaggaaacgaggccatccgacgactccgcgctcgaggcacggatcaacgaggcgggaactgcgctgaagcagttcgttcgcgacttgttctacccgcgcgtcactagcggccgggatgccgagggcgacaccgccatggctaacggttcgaatggcctaggagagaacgtcgaggtgattaacattcccttggctcccgaagacgagctggcagacattccggccgagatgcgggcgaccgtggccgccgagattgcagctttccgagaaaggagcaacaagcgagatttggagcgtctccggaaggaggaagagttcgaagagatggaacgtcaacgcaatggcgcgccccgcaagtcgcgtctagactccccgccgccgagcaattccaacatggttccgctagcgccccgcggcgctccgaatgccccggcgggtcccaagggacagagccgtggcgtggagtttgtcaacggcggcacgaccaacgggcaacggtttccggacgacgatgacacggatgcagatgacgaggagctttacaatagggagctggcaaaacagcgggcggaggacgagaagctctacctagaggccgagcggaagtgggtcaaccgtgaacggcagcgcgcagccgcgctcgacagagaacgggaacgcgagcggtcagaaacagaaggtttcgcccgcaggagggaggagcagctcgagagggacaagaattgggatgacgaccgtgaggcatcgcgcaagagtcatctctactaccgcgatcacggccagtggatcagggaacggactgctttccgagcagcagaggcggcccgggacgagatggaccggcgcgccgaggaggaggagcggcgcagggcggaggccgagatggaacatgccagagacatggccgattccttcctggagcggcaggccgcggaaatggagaggcaaccagcagcccctgcggcaccgcagcgcgtcaccatctcctttggtgcggcggcccagaaggcggctcagcgcactgcggccccacgccgcaccgtggccgaggttgaaggtctgctcgacgacgaggagcaagaccagaccaccaagcggcagctggtgcccatcaagtttgagcccatcactgacaccaaggccatgtccgaggaggacatccagaacgccgtgcgcgcgcttgcgcacgagatcccagtcgaccgggaaggcctctgggcatgggacgttaagtgggactatcttgaggagtcggttatccgcgagaagctgcggccgtttgtcgagaagaaggtggtcgagtacctgggcgtgcaggagcaattcttggtggacgttgtcgaggagcacctgcgcaagcaccagaagccggctgaattggtggagacgctcagcgaagccctggacgaggacgctgaagacatggtcaagaagctgtggcgcatggtcatcttcttcaccgagagcgagaagcgcgggctacctgcgtga

SEQ ID NO: 3081 - protein, 755 aa, Myceliophthora thermophilia
MAYNPYGVPPYGAPPVYPSYPGASHPPGMAPPPGLGPPPGMSSAPGMAPPPGVQPPNSATQANRPSGLPASFQPPPNLPNINFNAPVIRLGASMPPAKTGSSISSDRKDSHTPTSGRPGLGADRADQSRGQTRESMQSLIPPTAEERLRTIFVHKIPEGVGGEAGIQQLLSTVGRLRRWDSGQSHLSEHKGALFGFAQYEDPESLAAAVELLKDIEVPVKKQSPTENPPADDDDKFEGIDKEKLKVEVDPSTVKYLESWKETRPSDDSALEARINEAGTALKQFVRDLFYPRVTSGRDAEGDTAMANGSNGLGENVEVINIPLAPEDELADIPAEMRATVAAEIAAFRERSNKRDLERLRKEEEFEEMERQRNGAPRKSRLDSPPPSNSNMVPLAPRGAPNAPAGPKGQSRGVEFVNGGTTNGQRFPDDDDTDADDEELYNRELAKQRAEDEKLYLEAERKWVNRERQRAAALDRERERERSETEGFARRREEQLERDKNWDDDREASRKSHLYYRDHGQWIRERTAFRAAEAARDEMDRRAEEEERRRAEAEMEHARDMADSFLERQAAEMERQPAAPAAPQRVTISFGAAAQKAAQRTAAPRRTVAEVEGLLDDEEQDQTTKRQLVPIKFEPITDTKAMSEEDIQNAVRALAHEIPVDREGLWAWDVKWDYLEESVIREKLRPFVEKKVVEYLGVQEQFLVDVVEEHLRKHQKPAELVETLSEALDEDAEDMVKKLWRMVIFFTESEKRGLPA

SEQ ID NO: 3082 - DNA, 2394 bp, Myceliophthora thermophilia
atggcgcaaccaaacggagcctcgtcgctcagccgcgcgaagtcaacgcgcgcatcggcaaacatcggcaagccgtcccagagtgcctcgcgcgggaatgcaccgggcgccgtcccatcgaccacgacttctcaccaaaccacctcgccgactgcccggtctcatgtctccctctttcttgccaacctccgcctgctcaatctcgaccagcaccccgactggcccgacatcaacgcgctcacattcagcacgaaggatctggctcaagggcagaagaagcgcatccaatcggtggagtgggccctgtaccacctcttcaggctgtgggacccggacgaagcacgcaacaagctgcagcccttctttccaccgctcgaccaggtccagtcgctgaatctccgcgccgcgttgctgaggggcttagagcaagcaaagaagaatggtgttctcggccgggatgccgtcgtgcgcaagaccatgctcgacgaatgcaagggcgagcggctggaggaggtgctggccgtcttctcgtcggccgtcctcaaaaaggtggttgctgagcagcagctgaatggagggggccaccctgctcttgcccagactcttgctcttgagaatcgagggtactctggtgaccggaccgagctggtggccctcgtcatcgcacacaaggcgtcgttgcgccgcatgctggacgagaagaacacggatcgggcacggttccgggagttctctgactggttggcgctgaaagaggagacggttgccaggaagcgtgaggaggctgaggctgcgaagcgaagcggccggaaaaaggtggtaaccgacgaagagaagcgcgaagtctggggcatagtgcgaaataactgggctggcaacgaacgatggatggaggcgctgctctacggcgacagcaagtcccacaaggatggtgtgctcgcgaccccgtatgaccgtgtttggagacgggtccaagaaggaaggcttgccgaactcgagggtacatctgccggccttctggaacggttggaacaccgagtccaggggcagcaagcacggctggagaagtggcaagggtttcgccagaggctgtttggaaagactgggtctgaggccgcgacgaaagggcagaaacaggagcctaaacacaagggcatcgatctcggctttcgagagcacgagagcctccgtctcgaccgtctgagcccaaggaagctgccgagaccctcgcccaagcagctcgacagccactacgaggcgctcattgaaggtctcaggtcggatctatccaaaatcggctcaaccgctccagccatccccgcgttcttccgcagaccgccgccgctggagcgaccagagccgccgaccgaggatgccgagccggaatccgaagtaatatccgacatcagcgagctcgaggaggcacggccaccgccacgtccgtcgccctctcgccgtgaaccgatcaaagtgtcggaagagccagcatttgaaccggtcctacggaaagccaagacctttgatgatgagcacggattcttcgaggatgaacccttgatcccatctcgtctccagagatcagccaccgtccagcctcagtcgccttctgcgagacggcggcagagccaagactcgccgacgaagtctccagagcggcggtttagttcggcaccaaaagctacccggcgcccttcatcgcctccacccccggctccttcccctcctcgagtggtgacgccatcaccagagccgccaccttcgcccgaacaggcggtatcgccaacacagcagctcgcggatcaaatactcgctgcggttagcgccgcctccccgtctcccgtcaagaaaccgcgacacaggctctccctggccgagcgcactcgtctctccatggcacgggtcacgtcccacgcgaacctccgcgttccggaagcggacgaagacgggtttgacgaggcagggggagaagccgttccggaggcggataatgggaatcgtggcgcgctcgaccgcgcgccgaggccagtcgtctcctccgtggccgaaccgtcaacggcggaacgcgaggcgggggggtatgaagacctggttgcccgcacgaggcggagcttggccggctctgaagcggcaagacagaaagcgcagctggaacggcgacggtcgttgaaaagggggatgcagagcggcggcggcgccccgtcgacgccggccgcggcggggaggagaagcaactacttccgtgccgtcagtgaagaggagggcaattcgacattgcagctcgccgaggagctcttgaatggcgggcgcgagaatgattatgaggcggtctttatgagccgcccaaagctgaagactagcccgatcggtacacccgtgagggaattctgggattaa

SEQ ID NO: 3083 - protein, 797 aa, Myceliophthora thermophilia
MAQPNGASSLSRAKSTRASANIGKPSQSASRGNAPGAVPSTTTSHQTTSPTARSHVSLFLANLRLLNLDQHPDWPDINALTFSTKDLAQGQKKRIQSVEWALYHLFRLWDPDEARNKLQPFFPPLDQVQSLNLRAALLRGLEQAKKNGVLGRDAVVRKTMLDECKGERLEEVLAVFSSAVLKKVVAEQQLNGGGHPALAQTLALENRGYSGDRTELVALVIAHKASLRRMLDEKNTDRARFREFSDWLALKEETVARKREEAEAAKRSGRKKVVTDEEKREVWGIVRNNWAGNERWMEALLYGDSKSHKDGVLATPYDRVWRRVQEGRLAELEGTSAGLLERLEHRVQGQQARLEKWQGFRQRLFGKTGSEAATKGQKQEPKHKGIDLGFREHESLRLDRLSPRKLPRPSPKQLDSHYEALIEGLRSDLSKIGSTAPAIPAFFRRPPPLERPEPPTEDAEPESEVISDISELEEARPPPRPSPSRREPIKVSEEPAFEPVLRKAKTFDDEHGFFEDEPLIPSRLQRSATVQPQSPSARRRQSQDSPTKSPERRFSSAPKATRRPSSPPPPAPSPPRVVTPSPEPPPSPEQAVSPTQQLADQILAAVSAASPSPVKKPRHRLSLAERTRLSMARVTSHANLRVPEADEDGFDEAGGEAVPEADNGNRGALDRAPRPVVSSVAEPSTAEREAGGYEDLVARTRRSLAGSEAARQKAQLERRRSLKRGMQSGGGAPSTPAAAGRRSNYFRAVSEEEGNSTLQLAEELLNGGRENDYEAVFMSRPKLKTSPIGTPVREFWD

SEQ ID NO: 3084 - DNA, 1029 bp, Myceliophthora thermophilia
atgtccgccgagatggcaaacgagatcaaattgatcagtggccgcagccaccccgacctcagcgagaagatcgccaagcggctcggcatcgaggtcgcccggaccgtctccctcaactactcgaaccaggagacctccttcacggtcggcgagtcggtccgcgacgaggatgtctttatcgtgcaatccaccgccacgggcgacgtcaacgaggggctgatggagctgttgatcatgatttcggcgtgccggactgctagtgccaggagaataacggctgtgatcccaaactttccctatgctcggcaggacaaaaaggataagtcgcgagctcccatcagcgcaaggctggtcgcgaacatgctgcagaccgccggtgccaaccacatcatcacggtggacctccacgcttctcagatccaaggtacggcatccgctctagcctctgttgcctcccaggcgtccgagtatctcgtccagggcttctttagcgttccagtggacaatctgtacgccgagccttctttcctccgctacatcaaagagaactacaacccggaagactcggtcattgtctctcccgatgccggtggcgcgaaacgtgcgacatccattgccgatcaccttaacactgcgttcgcactgatccacaaggagcgccccaggcccaatgtggttggccgcatggtgctcgtgggcaacgtccaggacaaggtggccatcctggttgacgacatcgcggacacctgcggcaccctcgtgaaggcggctgccgtgctgaaggagaacggcgccaagacggtcatcgccctcgtcacgcacggtgtcctgtccggcaatgccatcgagaccctgaatgccagcgtcctctcgtctctggtcgtcaccaacaccgtgccgctcggagacaaggtggagcggtgccccaagctgcgcgttattgacatcagcccgaccatcgcagaggccatccgccgcacgcacaatggcgagtcggtctcgtatctgtttacccacgccccggtctaa

SEQ ID NO: 3085 - protein, 342 aa, Myceliophthora thermophilia
MSAEMANEIKLISGRSHPDLSEKIAKRLGIEVARTVSLNYSNQETSFTVGESVRDEDVFIVQSTATGDVNEGLMELLIMISACRTASARRITAVIPNFPYARQDKKDKSRAPISARLVANMLQTAGANHIITVDLHASQIQGTASALASVASQASEYLVQGFFSVPVDNLYAEPSFLRYIKENYNPEDSVIVSPDAGGAKRATSIADHLNTAFALIHKERPRPNVVGRMVLVGNVQDKVAILVDDIADTCGTLVKAAAVLKENGAKTVIALVTHGVLSGNAIETLNASVLSSLVVTNTVPLGDKVERCPKLRVIDISPTIAEAIRRTHNGESVSYLFTHAPV

SEQ ID NO: 3086 - DNA, 1158 bp, Myceliophthora thermophilia
atggcggtacaaggccacctcttccatttcgagctccaaagcccaccatttatgccctctgtcttctgccagccagtcggcattggcgggccacagggtcccgggctattagactttcctgtctggccaatcctcgtgcccgctgccgacggcttccgggtatgctataccgacgacgaggacttccgcgacgcctacctggcacggggcttctgcggcctcgatgccgcgttcagggaccagttcgaccacgactgccaccggcaagctgttcacgttgcgcccaccgtccgggaagagaaactgggcaggccgaagcaaaccagccaggatgggggcagccagaaggggaaaagccgctcctcgcgaaacgatcaggaggagagcatgcttcagaccatgttcgagcccttttccgtctttgattacctctccctgcccgtcccgcgcttcttcatgaacgccgtgcgtctcgtgcggccgtacgtggacaagctgacaaggtgcaccctcaccttgttcggggtcatgtgctacatcagcttcctcgccatgcccgtcatcgccctggctctgctcgccgtgacgggcatcgtgggcgcggtcatcttgtcgctggagaacctcgggctgatcaagcctggcactttggaccccccgaatccgggcaagcgcgttccggcgacggcaaagatatcagcagcagcagcaacgaccagcccgattccgcgcccccgcgtcgccgccgccgccgccgccgatcccaccatggccactacgacgcgccgagctgccacggccaaccacaaagacatttacaaagacaactacgacgacgacgtcgtcggaaaagaagagccgttcgagctggtaccgagaatgtcgtccgctaaggcggccagcagcgaagccgacgagagcggcatcgcaactgtcgagacgttgcgtcggcggctgcagcagaggaagcttcagcagcagcagcagcaacagcagcaacagcgcaacgtccggatcttcgcgccgggctactctcctcacggctgggaccgggtggactcggatgacgaggacgaggacgaggacgaggacgacgaggacggcactagtggccgtgccaccccgccgtcgtggagctcgttcgctgctgaggcctga

SEQ ID NO: 3087 - protein, 385 aa, Myceliophthora thermophilia
MAVQGHLFHFELQSPPFMPSVFCQPVGIGGPQGPGLLDFPVWPILVPAADGFRVCYTDDEDFRDAYLARGFCGLDAAFRDQFDHDCHRQAVHVAPTVREEKLGRPKQTSQDGGSQKGKSRSSRNDQEESMLQTMFEPFSVFDYLSLPVPRFFMNAVRLVRPYVDKLTRCTLTLFGVMCYISFLAMPVIALALLAVTGIVGAVILSLENLGLIKPGTLDPPNPGKRVPATAKISAAAATTSPIPRPRVAAAAAADPTMATTTRRAATANHKDIYKDNYDDDVVGKEEPFELVPRMSSAKAASSEADESGIATVETLRRRLQQRKLQQQQQQQQQQRNVRIFAPGYSPHGWDRVDSDDEDEDEDEDDEDGTSGRATPPSWSSFAAEA

SEQ ID NO: 3088 - DNA, 954 bp, Myceliophthora thermophilia
atgaagtcacactcaatactcgacgtcgtcccgaacgagatcctcgacggcatcctctgccacctgcccaccaccgccctcctccctctggcgggggtcagccgccggctccgcgcggtgacgctgcacatcctcaagcagcgcctggcccgcgccgtctccgagccggaccaccgcgtcatgctcgagtgttaccacccggccgagaagctctacacgccctacctgtactgcgactacctccgcgctgaccccttcaccaagagcgacggcaacggcagcgatgccgggtgcctggggggagcgtatgcgcactttcgtccggtggagagcgacgagactaggtcgtgggcgaggcggagatccgcgctgtggggcaggcactgggacgttgacgacgacgacggtggtggaggtggtggtggtgatggtgatgatggtgttagtaatggccggaaggaatcaaggccctcggtcgacctgtacctcgacgatgacgagtcgttttcccagctgtgcaccatcacgaacattgttcggctggggcccaagccgggcctttttcgcagccacgtcaatatcaacgatggcgtggtgcgcgtgtggcgtgactggttaggagcaagggcccgggctgcggccgccgggagaggcggtgagggaggagcagcaggaggaggagaaatgattggtggcagtggagaggaccgggaggtcgtgctctgggccgacccgtaccgcaacgtcggcgtgcggttccgtgtgacggagaaggacgttcgcgggcagcaccaccccgtgcttgtcgccaacgacgagcagctgcccgtggcgtaccgtctcgagttcgaagagctgctggtgaggagcacaacgttgctggtcatggtggaaaagtcggaggtgcaagagagctctgacgagagtaaagctattgtgtttgtgttgttctga

SEQ ID NO: 3089 - protein, 317 aa, Myceliophthora thermophilia
MKSHSILDVVPNEILDGILCHLPTTALLPLAGVSRRLRAVTLHILKQRLARAVSEPDHRVMLECYHPAEKLYTPYLYCDYLRADPFTKSDGNGSDAGCLGGAYAHFRPVESDETRSWARRRSALWGRHWDVDDDDGGGGGGGDGDDGVSNGRKESRPSVDLYLDDDESFSQLCTITNIVRLGPKPGLFRSHVNINDGVVRVWRDWLGARARAAAAGRGGEGGAAGGGEMIGGSGEDREVVLWADPYRNVGVRFRVTEKDVRGQHHPVLVANDEQLPVAYRLEFEELLVRSTTLLVMVEKSEVQESSDESKAIVFVLF

SEQ ID NO: 3090 - DNA, 576 bp, Myceliophthora thermophilia
atgtccagcgcatcgacaagctcagctgccgctgcgtctctgctgaagcggcagctgaagcagatgcaatccgccaaggacctcccgggcatctcgtgcgggttggtgaacgacaacaacatctttgagtgggaagtcatgttgatgatcagcgacgattgcaagtattatggcgatatgggagctaatgattccggcacccttcctttaggaggcaacttccgcgcgcatctcaccttccctccgacctacccgctcatgccccctaagatggtcttccaggcgccgatccccttccacccgaacatctacccgagcggcgagctctgcatcagcattctgcacccccccgaagaggacaagtacggctacgagtcggccagcgagcgctggagccccgtgcagacgcccgagacgatcctcctgagcgtcatcagcctgtttgaggacccgaacgacgagagccccgccaatgtcgaggcggcaaggctgctgcgtgaggagcgggagggaaagagcaaggagttcaggagacagtgccggaagtgtgtgagggagagcttgggggaggattaa

SEQ ID NO: 3091 - protein, 191 aa, Myceliophthora thermophilia
MSSASTSSAAAASLLKRQLKQMQSAKDLPGISCGLVNDNNIFEWEVMLMISDDCKYYGDMGANDSGTLPLGGNFRAHLTFPPTYPLMPPKMVFQAPIPFHPNIYPSGELCISILHPPEEDKYGYESASERWSPVQTPETILLSVISLFEDPNDESPANVEAARLLREEREGKSKEFRRQCRKCVRESLGED

SEQ ID NO: 3092 - DNA, 381 bp, Myceliophthora thermophilia
atggtttgggtcgaggctgaagttcgaggcgaagtacggaccgggcggcctggcgggacgggagggttgtggtgcggatcaggcctgggggacgctaacttcgaaaccaccgtagtggagctgagcgtgactgtcgcaccgcccggggcaccgtggggcttgggtgctctacctgagcaaccaaaagccccgcagcttgttttatgggatcggggagccccgcaggtcacaagggattggagagcgccggcgaagatcagaacctcatgctcccccggccagcaccagcgccagcaccccaaatatctactgcgtatgaatacatgtactagacagagtgagaaggcataccgttgtagcgtgtttcaatttcattgttag

SEQ ID NO: 3093 - protein, 126 aa, Myceliophthora thermophilia
MVWVEAEVRGEVRTGRPGGTGGLWCGSGLGDANFETTVVELSVTVAPPGAPWGLGALPEQPKAPQLVLWDRGAPQVTRDWRAPAKIRTSCSPGQHQRQHPKYLLRMNTCTRQSEKAYRCSVFQFHC

SEQ ID NO: 3094 - DNA, 1629 bp, Myceliophthora thermophilia
atggcgtccgttcctcgacctcaactcgttccaaagatcaggattgttgaccgcgtgctaccatctactacagagagcacgcccaagacgtttgacggcctcgacgatgaggatgagcccatgcccgatgctgccggacaggacgatgcggagccagagcaggaaggagaagaggaggaggaggctgagaaggccgataaggacgacaaagacgacggttcggtcgccgaggaagaagcccgagaggaggatgaggagtccgcaaagtctccgacacctcctccggaacctgtcgttcgtcgccgacggttagggagacctcccaagaatcgcccgccggactgggacacgctgcccatcgagcctccgaaccccgacgccacaccacgacgccgcggccgtggcggttggcgcggacgtggtggacgtaaaggtcagcactaccagccgacgcagcagtccatcgacaaggatggcaccgttatggacattgttaacgacgaggtcgacctgccggaggatcccgagggcgagacgaaggtcgacaagcttggaaatctcaaaggcgggcgcgagtaccggtgccgaactttcacgctgcccaaccgcggcgaccgtctgtatatgctatccaccgagcccgcccggtgcgttggcttccgcgactcgtacctcttcttcaccaagcacaagaagctctacaagatcatcgtcaacgacgaggagaagcgagacatgatcgagcgcgaaatcatcccgcacagctacaagggtcgctcgatcggtatcgtgacagcccggtccgtcttccgcgaattcggtgccctcatcattgtcggtgggcgaaggatcatcgacgactacgaggttgccaaggcacgcgcggagggcgtggtcgagggcgagctggccgacccgtcggacgtttacgacccggacaagccgtacaacaagaatcagtacgttgcctggcacggcgccagttcggtgtaccatgctggcggtccgtccgttccccagcaaaacgccaaggccgacagcaagaagcggcgcgtcgctgtcaacgatgtcaactggcaactggagcatgcccgcgaggccagccagttcaacagcatgctgtccgcggtccgccgcgccaacctcaatggtgtctacgacattcacaccaaccaaatgcactatccagctatcatgcagccgacgcacgcgcgtatcgagcaggtcgtggaccgcgaggagagcgaaggcgacgcgccttcgagaagatcgacaaagttccccccggtcaagccatccatctcgcgcaacttcctcgtcatggacatgcacctcgagacgccaccatccggcgtgtcggcggcggcgtacgatgtgcccttccgcacgtcccaggccgattacgagtcgtcggcggccgcggatttcctggcgccgttcaggggcctgcgggcggtgccggacgaggtccgcgacctgctcccgccggaatgccggcaggcgttcgacaaggccagggccaaggaagacagctggttcgagagatggggcaacgaggccgacgtgacttcgagacgtgacccagtggtggataaggccattgtgccttattcaatgactcttgcttga

SEQ ID NO: 3095 - protein, 542 aa, Myceliophthora thermophilia
MASVPRPQLVPKIRIVDRVLPSTTESTPKTFDGLDDEDEPMPDAAGQDDAEPEQEGEEEEEAEKADKDDKDDGSVAEEEAREEDEESAKSPTPPPEPVVRRRRLGRPPKNRPPDWDTLPIEPPNPDATPRRRGRGGWRGRGGRKGQHYQPTQQSIDKDGTVMDIVNDEVDLPEDPEGETKVDKLGNLKGGREYRCRTFTLPNRGDRLYMLSTEPARCVGFRDSYLFFTKHKKLYKIIVNDEEKRDMIEREIIPHSYKGRSIGIVTARSVFREFGALIIVGGRRIIDDYEVAKARAEGVVEGELADPSDVYDPDKPYNKNQYVAWHGASSVYHAGGPSVPQQNAKADSKKRRVAVNDVNWQLEHAREASQFNSMLSAVRRANLNGVYDIHTNQMHYPAIMQPTHARIEQVVDREESEGDAPSRRSTKFPPVKPSISRNFLVMDMHLETPPSGVSAAAYDVPFRTSQADYESSAAADFLAPFRGLRAVPDEVRDLLPPECRQAFDKARAKEDSWFERWGNEADVTSRRDPVVDKAIVPYSMTLA

SEQ ID NO: 3096 - DNA, 1263 bp, Myceliophthora thermophilia
atggagccatcaacacaagccctcccccccgtcgacctcaagccattgctcgcaaggctctggccattgggccacccgaagcccgtgtcgccaacggagatcgcagaagccatctcgtattttttcacgaaccaggtctccgacgcccaagccggcgccttgttgatatgtctgcacttcactggcctcgaccggcaggccgaggtactggccaagacagcagagtgcatgctgaaggcggcagcaaagatcgaccagtctgcccttcgagcggtcatcgacgcgaggcgcagaaaggaaggtcaataccagggtggactcgtcgacatcgtcggaaccggaggcgactcccacaacaccttcaacatcagcacgaccgcctccatcatcgcctccagcctcctcctgattgccaagcacggcaacagggcctcgacttccaaatccggctccgccgacctgctgaactgcatgcagccgcagccgccccggatcgaccgcgtccgccccgacaccatcgccgagctctacagcaacaccaactacggtttcctgttcgcgcccgtcttccacccgggcatgcgctacgtggcgccgatccgcaaggagctcccctggcgcaccatcttcaacctcgtcggccccctcgccaacccgaccgacctccgctcgcccgccgacctccgggacaacgccgacccgctcctcgaggcccgcatgatcggcgtggcgcgcaaggacatcggccccgtcttcgcgcacgcgctgcagcttgtcggcgcccgcaaggccctcgtcgtctgcggtgacgaggagctcgacgagatcagctgcgccggcgacacgctctgctggcggatccggcccgccgacgacgggaccaccgtcaccgagcacttcctgctgcacccgcgcgacttcggcctgccgacgcacccgctctccgatgtctcccccggcaaggagccgcacgagaacgcggcgatcctacggcggattctggagggccagatgcccgaggacgacccgatcctgcacttcgtcctcatgaacgccgccgcgctgttcgtggtctccggcgtgtgcgaggccgacacgagcgatctgggacatggcgatgacggcgtcgtcatcaaggagcgtggccccggaggcgggcgctggaaggagggcgtacggagagcgagatgggccatcaagagtggtgaggcggccaggcagtgggccaagtttgtccaagtaacgaatggcttcagtgaatga

SEQ ID NO: 3097 - protein, 420 aa, Myceliophthora thermophilia
MEPSTQALPPVDLKPLLARLWPLGHPKPVSPTEIAEAISYFFTNQVSDAQAGALLICLHFTGLDRQAEVLAKTAECMLKAAAKIDQSALRAVIDARRRKEGQYQGGLVDIVGTGGDSHNTFNISTTASIIASSLLLIAKHGNRASTSKSGSADLLNCMQPQPPRIDRVRPDTIAELYSNTNYGFLFAPVFHPGMRYVAPIRKELPWRTIFNLVGPLANPTDLRSPADLRDNADPLLEARMIGVARKDIGPVFAHALQLVGARKALVVCGDEELDEISCAGDTLCWRIRPADDGTTVTEHFLLHPRDFGLPTHPLSDVSPGKEPHENAAILRRILEGQMPEDDPILHFVLMNAAALFVVSGVCEADTSDLGHGDDGVVIKERGPGGGRWKEGVRRARWAIKSGEAARQWAKFVQVTNGFSE

SEQ ID NO: 3098 - DNA, 654 bp, Myceliophthora thermophilia
atggcccccaatccgtacctcctcgcagccgacaacccagaggctttgctctctctcttgcgccaagacccctccctagcttcggttcaagacgagcacggctactccctcgtgcacgcggccgccagctacaaccacctcgacctccttcgagccctgatccgcgagttcaaggtccctgtagatatcaaggacgaagacggcgagaccgcgctgttcgtagtcgaaaccgtcgaggccgcccgggtcctcgtcgaggagttgggcctggatgccacgatccgaaatgatgagggccagacggccgcagagaagatagaggccgaggcggactggcccgcggtagcggagtatctccgcggtccagatgggggctcgtcggctaacaacggtacgccgaatgggacggcatcgaacgggaccggcctgccccccgtcccggagggcttgcaagttacgatgggtacaattgatgaggcagaggtgaatggccagcaacccgatcccgagttccgcagacggatagaggaactagccgccagggaggattttcagacacctgagggtcaagccgagttgcggaagttggtcgaagaggcaatcggcggaggggtcttcggcgaggaccgtaatgttcggccgcgtcaagagtga

SEQ ID NO: 3099 - protein, 217 aa, Myceliophthora thermophilia
MAPNPYLLAADNPEALLSLLRQDPSLASVQDEHGYSLVHAAASYNHLDLLRALIREFKVPVDIKDEDGETALFVVETVEAARVLVEELGLDATIRNDEGQTAAEKIEAEADWPAVAEYLRGPDGGSSANNGTPNGTASNGTGLPPVPEGLQVTMGTIDEAEVNGQQPDPEFRRRIEELAAREDFQTPEGQAELRKLVEEAIGGGVFGEDRNVRPRQE

SEQ ID NO: 3100 - DNA, 1707 bp, Myceliophthora thermophilia
atgtcgtcgatgccttcaacatactgccctgagcgggcagcacctataccggcccagggcaaggacgaaccggcaacccttccatcgccgagctcggagaactcggaggtaagccatgccgccgtggctacccaggagaacaacgagaacctgacgtccggccttcccttttcgaaagcgcgatgtattggcctcgtggctacgttgtcgggtgccagctttttgaatagcatgtcagggcaagccgtggtcataattctccccacgatcggccgagagctcggtatcccggagtcgcggctgcagtgggtcttgtcagcgtattcactcgcctttggatgctttctgctcttctgggggcgagtagccgatatctacggaaaacgcaaaatcttcgtcgccggctcggcctggtttgctgccacaacccttgttaatcccttcttgcccaacgagatcgcgtttgatttgtttcgaggtctccaaggactgggtgctgctgcaagcgtgccgacggcgataggaattctgggcacaacgtttcctcccagcaaggccaagaactatgctttcagttgttacgctgccggtgctccgctcggtgccgtgcttggaaatatacttggtggcatcatcgccgagtacgtctcttggaaatgggtgtttgtggcaatagctctggcagcttttgccattactgcagctggagtattcgtcatcccgccctctgagcgcgctggcagcgacggggatgtccaaaagccgtctgtcgactggttgggggccgtcttgattaccgtcggcctgctggctctcctcctggccctgacagaagggaacgtggtaggatggaggacgccgtggatctccgtggttatcgttgtctccatcatgctcgtcgccctcttcgccttttggcagcaccacctcgaaaagacgggcaaaagagcgccaatcttgaaggtgtccaacttccgaaacccacagttcagcgccgccatgggcaccatggcgctcttctttagcagtttcaacggttttcttgtgtacgcgacctacttctaccaggactaccaggggctttccccgctaaacacgacgctgcggttcctacccaccggcatcagcggcttcatcacggccgccgtcgtctcgcagctactggcgcgagtgccgacgtacctcttgctggcgttcggcaacgcctctgtgtccctctcggcgctgctctttgcagtccccatccctccagatactacgtactgggcctggtcattcccggccatgatgatctcggtttttggagccgatacgacgtggccgtgcctggttctcttcaccagccactcactgccgccccaagaccaggctctcggaggtgcgctcgtcaacgcaatgggccaggtcggccgagccattgggctggcggtagcgacggcgatccagacggcagtcatgtccactgagagaggagtgagcgtggaggaggcaggctctgtccaagtgggtgatcgggcttcgctgctgggccttcgggccgccgagtggtggaactttgggctgggcattagcgcgctggccgtggtgttggttgcgtttagagggactgggatcgtggggaaggctggagtcgcaaagccaagtgactcggaagggccggaacttccagcagagggccgcaagcaagaacaagctgccgccagctaa

SEQ ID NO: 3101 - protein, 568 aa, Myceliophthora thermophilia
MSSMPSTYCPERAAPIPAQGKDEPATLPSPSSENSEVSHAAVATQENNENLTSGLPFSKARCIGLVATLSGASFLNSMSGQAVVIILPTIGRELGIPESRLQWVLSAYSLAFGCFLLFWGRVADIYGKRKIFVAGSAWFAATTLVNPFLPNEIAFDLFRGLQGLGAAASVPTAIGILGTTFPPSKAKNYAFSCYAAGAPLGAVLGNILGGIIAEYVSWKWVFVAIALAAFAITAAGVFVIPPSERAGSDGDVQKPSVDWLGAVLITVGLLALLLALTEGNVVGWRTPWISVVIVVSIMLVALFAFWQHHLEKTGKRAPILKVSNFRNPQFSAAMGTMALFFSSFNGFLVYATYFYQDYQGLSPLNTTLRFLPTGISGFITAAVVSQLLARVPTYLLLAFGNASVSLSALLFAVPIPPDTTYWAWSFPAMMISVFGADTTWPCLVLFTSHSLPPQDQALGGALVNAMGQVGRAIGLAVATAIQTAVMSTERGVSVEEAGSVQVGDRASLLGLRAAEWWNFGLGISALAVVLVAFRGTGIVGKAGVAKPSDSEGPELPAEGRKQEQAAAS

SEQ ID NO: 3102 - DNA, 3000 bp, Myceliophthora thermophilia
atggacggagcggcacaaggcgagacaagggagcaacaggaagcggcccccgctgcagcaccgccgccgccgtcgccaactcgagagccgcgggagcgcgatccggattcgccgggtacggtcgcatcggatgcggcgcgagagccagcggcattaccgaaagctgcaacctcggccgcgagtccgctagcgagcgcggcagccgtggacgatggcgcgacaccacaagcccggccagcagatccggcgaccatcacggacacggcgcccgcaagtccctcactcggtctgcggactgggggcgaggcaccctcagacgagcagccctccgcgggccagtcgatgccgccgagttccaatccgccagcagccagcccgagccaagcaggccagggccaaaaccaggccgcgaacagagaagcgctgcgctggacagacccaatcacgattacggccgacgggccgggaactgcccagtcttctcagcgtgccaaatccccacagcggccgctggagcacgcacagcaacaacccttggggccgccactaccaccgccgccacaattgcagcaacaacagcaccatcttcagcagccccaacacctgccggtgccggcacccccgcccccagccccgtccttccagcaggagcccgggtcgggtttgcaacaacaatcccgtccgcgatcgcggtcaccgccgcagctgctcccgcgggcgcaaccacaccagtacccgcagcacgacgcgcgactccattcgcatgcatcgccggcgccggcgccgtcgcagtcgcagtcgcacattcaacagtcggccccaccatacccacaggcacaggcacacgcgcaaatgcaaattgcgccccagcatcagcagtcgcatcatcaacaacttcaagagcagcaacatcaccatcctcctcatcaccatcaaccgccactgctgccgccgccatcgtccgcgcccgtgacgccctccacaccctcggtacctttgcacccttcgcacgcgccacagtttcattcttaccatccccagtcccagcagaggtcgcactcgttacatgaagtgaatcgcgctatcatctcgaagccggtcatcatggacccacccacggctcggaaacaagcccagccacagtaccacgccggcgccatgggcttcccttcgccgacccgggactacgccactgttaatcccaagttcctcgatgacttcacccgcatcaaatttgccattcagcagagcgtgcccgaggctgttcgtcgtgtcgtccgcgatcactgggaaaagtgtctgctcggctccgagttccatcaagcctttatccgctcgctaacccggtttaagctgaatgcttccattcaccatgcaaccccctctattacgcaacgcgcagttcgagacttcggaggcaagatggtcgccgagtcaaaacacgagatcatcggccattttaccaccgaagcgctggacgaggtcgccgatctcatcatcagcaaagcgagcgacagttttctggacaaatgtcttgcgaagcgcctcttgaccatcgaggcaaaaccgctcatcaacgctctcgccgctgccgagcgcctggggtacgagcctggcgacatagttgaggacgagaagctcgagcgggcgatgcctcaggaagcctaccctggagcaaccgccgcggccaatggccatctcgccggcccagctcaagcgcaccctctatacccgcagcctgggcaagcccagctccaatgcacgaagtgcttccggacgtttgtgcacacctcggcgttcgactacggcttcacgaatattgtcgaacttcaagggcatctccatcaccaagtctgcggaaacccagagcagccacaaccggcccgccgcggccgaaagccgaaatcgtcgctggtattccaggccagtccaccaccagttaccactccatccggtgcccgaccggcacccgcaaatgggactcccagaacgctgcagcagtcgactccgacgcactttagcctggcccggcccgcggcatcaacccccggctcggcgggctcgggcattgccgccgacccatatgcgcacctgagcgagcgtcagatccggctcatgaacgaggagctaaaggcagcagaggagaagtacgccccccgctttgcggaggcgaaccttattgccgacgaaaacttgcggcgtttaaggatcgagggactccggaacagcttcggcaccaagcaatccatgatccgcaagaaattcggtgtccgcctgcgcgagagacgcaccaaggccgagatccttgcggaacgcgagcgcctcggcctcaagaaggccgagaaggagaaggagagagagctggccagggcggcggccagcggcgcacagcagccgcacacctcgagtccgtcgcccaacgcggactcggcctcgcgccccgcaggcagcagcggatggaccgcggcgaacacaccgcgggcaaacgccgcctgggacgagcacgatgccaagcgtcgccggacggatgacggcggcggctatcagtcgccgtacaaatccctggccgatgagacgccgacccgcaagactcagtcagggtccctggccgcgggagggagctcatctgcgcccgcttccgcccagaactcgaccgccctcgccgcgtcgcaaccgacaagagtctacgagcaatcgggcgcccgagtggagatccacgagccgtccaagaccgacaagcccacaaacgggccgtcagccgccggacaagctcccgagtccactaccccgaacggttccgaccgcgcagcctctaacggacgcgatgccggctccatcaccacccgcgctccatcctccgagaaccagccggtcgtcatcgacgatgtctcgtcttcggacgacgacgacgacgaggacatcccctcaacgttgcccacccacgtccggaagagcctggcgtcgaagagcaccacctccccgcgccggcagactccgtag

SEQ ID NO: 3103 - protein, 999 aa, Myceliophthora thermophilia
MDGAAQGETREQQEAAPAAAPPPPSPTREPRERDPDSPGTVASDAAREPAALPKAATSAASPLASAAAVDDGATPQARPADPATITDTAPASPSLGLRTGGEAPSDEQPSAGQSMPPSSNPPAASPSQAGQGQNQAANREALRWTDPITITADGPGTAQSSQRAKSPQRPLEHAQQQPLGPPLPPPPQLQQQQHHLQQPQHLPVPAPPPPAPSFQQEPGSGLQQQSRPRSRSPPQLLPRAQPHQYPQHDARLHSHASPAPAPSQSQSHIQQSAPPYPQAQAHAQMQIAPQHQQSHHQQLQEQQHHHPPHHHQPPLLPPPSSAPVTPSTPSVPLHPSHAPQFHSYHPQSQQRSHSLHEVNRAIISKPVIMDPPTARKQAQPQYHAGAMGFPSPTRDYATVNPKFLDDFTRIKFAIQQSVPEAVRRVVRDHWEKCLLGSEFHQAFIRSLTRFKLNASIHHATPSITQRAVRDFGGKMVAESKHEIIGHFTTEALDEVADLIISKASDSFLDKCLAKRLLTIEAKPLINALAAAERLGYEPGDIVEDEKLERAMPQEAYPGATAAANGHLAGPAQAHPLYPQPGQAQLQCTKCFRTFVHTSAFDYGFTNIVELQGHLHHQVCGNPEQPQPARRGRKPKSSLVFQASPPPVTTPSGARPAPANGTPRTLQQSTPTHFSLARPAASTPGSAGSGIAADPYAHLSERQIRLMNEELKAAEEKYAPRFAEANLIADENLRRLRIEGLRNSFGTKQSMIRKKFGVRLRERRTKAEILAERERLGLKKAEKEKERELARAAASGAQQPHTSSPSPNADSASRPAGSSGWTAANTPRANAAWDEHDAKRRRTDDGGGYQSPYKSLADETPTRKTQSGSLAAGGSSSAPASAQNSTALAASQPTRVYEQSGARVEIHEPSKTDKPTNGPSAAGQAPESTTPNGSDRAASNGRDAGSITTRAPSSENQPVVIDDVSSSDDDDDEDIPSTLPTHVRKSLASKSTTSPRRQTP

SEQ ID NO: 3104 - DNA, 966 bp, Myceliophthora thermophilia
atgccgaccctccgcccacgcaagggcgctgataaggcgcctgcagctactctctcgtctgattcaacagcgacgacgccaactcccgtttcaaacgcctcttctactactgcaagagcgtctccagacaccctcagcaagagggctccccgcccaaccggagatgggaaacaggtcgctattgccgcaatgaatgagaccgcacttccggatgaggaaacacggttgatctcggatgatgcatctgagcgaggcggcgcgggtttacctccggcggtgccgacaagccggagttggacgcagcggaaccagtggattgttcttgcgcttgcgagcggggcgtgtgctgctttcaacggtgtttttgccaagttaaccacaacagagctcacgaccaagttctcttcaggcattgctcgcatgctgggactcgagagcgtggagggtgtgattgagatcattgtgagaggttcattcttcggattgaacctcgctttcaatggcgtgatgtggaccctttttaccgccgccctcgcccgcggcaactcgacaacccaggtgtccatcatgaacacctcgaccaactttgtcatcacggccatccttggcttcgtcatcttttccgaggctctcccacccctctggtgggttggtgcggctttgcttgttgcagggaacgtgatcatcggtaggaaggacgagggcacaccaaaggcacaagaggaagaagagggtgttggcgcagcctttctgggccccgaggttgagagtcagctagacggcggccgcagacaaggccgtggggggaagttgagcacgccggctaagcgcaacaatggacgatgcttcctgagggctatcgaaaaggtcaacggcggtgcacatgcagagcagtcctcgatatactggatcatcttggccgggcgcctcaatgaatctgcccctcaagctccgttagtacggtga

SEQ ID NO: 3105 - protein, 321 aa, Myceliophthora thermophilia
MPTLRPRKGADKAPAATLSSDSTATTPTPVSNASSTTARASPDTLSKRAPRPTGDGKQVAIAAMNETALPDEETRLISDDASERGGAGLPPAVPTSRSWTQRNQWIVLALASGACAAFNGVFAKLTTTELTTKFSSGIARMLGLESVEGVIEIIVRGSFFGLNLAFNGVMWTLFTAALARGNSTTQVSIMNTSTNFVITAILGFVIFSEALPPLWWVGAALLVAGNVIIGRKDEGTPKAQEEEEGVGAAFLGPEVESQLDGGRRQGRGGKLSTPAKRNNGRCFLRAIEKVNGGAHAEQSSIYWIILAGRLNESAPQAPLVR

SEQ ID NO: 3106 - DNA, 1722 bp, Myceliophthora thermophilia
atggtgcgatcgcgcctgtcgaccaaggagatccagtcgcgagcgctcgcatatgtgccggacgagctgctgcagaacatacccgagggcgagcagacatactcgctgtttcagggtttccaggcgagcttcccggacttcaccgaggagggcaaaaaacacaggcggcgcgtttcgagggggaggaggttgctagacgaagggccgacgacgcccgacgggagccccgagacggtgcagaagctcaagaaggagaaggcgtccatgatgcatgagttggagatgcttgggatccgcaagaacatggcgagcagcgagattcgcgagatcgatgccaagatcgagaacttgaccgggatgcgcagaatactcctggaacggctggcgaacctggagcaggacgaggcattgcttgagcatgacatcgtggacgtcgaggggaggttggaagaggcactagagctggccgtcgaggccgagtcggcggccttgcggacgcccacgagatcagaagacgacgcagcgtcagaaaagggggacgcgcctggattcatgtcccaatccgtttacgagaagctcccctcggcaaatagcacgccctccaagaagaaactgcgcagcatccggcggaaatcgatgcccatcctccacgagcacttccagcccggcaccatgatccgctcgttgcgcgcacaccacgacagcattaccgccctcgacttcgatgctccttttggtctgatggtctctgccgcgatggatgactcggtccgggtatgggatcttaatgcggggcgctgcatcggcctgctagaaggtcacaccgcatcggtccgcacgctgcaggtcgaggacaactttctcgcgaccggctccatggacgccacaatccggctgtgggaccttagcaaggcacactacgacccccagggcagccacttcggcaaggaggaggacgatgaggacgcgattgctttcgggaatcccgacgaccagcccgtcgacccgcccgccggcagcatggccgactgcccgctcttcacgctgcaggcacacctcgacgagatcaccgcgctgcacttccgggataacgtgctcgtctccggttcggcggacaagacgctgcggcagtgggatctggagaagggccggtgcgtgcagacgctggacgtcatgtgggcggccgcccaggcctcggttctctccgcgagcgagggcacctggcgccagaccacccgcgcggccgacatgtcggcggactttgttggggcgctgcaggtgttcgagtcggcgctggcatgcggcacggcggatggcatggttcgcctgtgggatcttcgcagcggccaggtgtcgcgcagcctggtgggccacacggggccggtgacatgcctgcaattcgacgacgtgcacttggtcacgggcagcttggacaggagtatacggatatgggacctccgcactgggtcgatatatgacgcctacgcatacgacaaccccatcacgagcatgatgtttgacactcgccgcattgtgtgtgccgctggcgaggacgtcgtcaaagtgtacgacaaggtcgaggggcgccattgggactgcggcgcgggcatcgccgaggccgaccagggcaagacgcccgccatcgtggagcgcgtgcgtgttcgcgatggataccttgtcgaaggccgccgggacggttttgttggtgtctggacatgctga

SEQ ID NO: 3107 - protein, 573 aa, Myceliophthora thermophilia
MVRSRLSTKEIQSRALAYVPDELLQNIPEGEQTYSLFQGFQASFPDFTEEGKKHRRRVSRGRRLLDEGPTTPDGSPETVQKLKKEKASMMHELEMLGIRKNMASSEIREIDAKIENLTGMRRILLERLANLEQDEALLEHDIVDVEGRLEEALELAVEAESAALRTPTRSEDDAASEKGDAPGFMSQSVYEKLPSANSTPSKKKLRSIRRKSMPILHEHFQPGTMIRSLRAHHDSITALDFDAPFGLMVSAAMDDSVRVWDLNAGRCIGLLEGHTASVRTLQVEDNFLATGSMDATIRLWDLSKAHYDPQGSHFGKEEDDEDAIAFGNPDDQPVDPPAGSMADCPLFTLQAHLDEITALHFRDNVLVSGSADKTLRQWDLEKGRCVQTLDVMWAAAQASVLSASEGTWRQTTRAADMSADFVGALQVFESALACGTADGMVRLWDLRSGQVSRSLVGHTGPVTCLQFDDVHLVTGSLDRSIRIWDLRTGSIYDAYAYDNPITSMMFDTRRIVCAAGEDVVKVYDKVEGRHWDCGAGIAEADQGKTPAIVERVRVRDGYLVEGRRDGFVGVWTC

SEQ ID NO: 3108 - DNA, 1380 bp, Myceliophthora thermophilia
atgttcgcctcgttggccgcccgcctcccgaacgccttgggccatgctgccccaagggctcacctccgccttgcgggccaggctcgcctcctcagcaggctggctgtggacgggagcaagggcagagccatgccgatgaccaataggagggccactgctgctgcgtctggcgtcgacgctaccttgactatcagggacggccccgtcttccacggcacggcttacggcgccaactcgaacatctcgggcgaggccgtctttacgacctcgctcgtgggataccccgaatccatgacggacccctcctaccgcggccagatcctggtcttcacccagcccttgattggcaactacggcgtgccctcgaacgagcgcgacgagtacaacctcctcaagtacttcgagtcgccccatattcagtgcgccggtgtcgtcgttgccgacgtggctgagaagtacagccattggacggccgtcgagagcctgagcgagtggtgcgcccgtgagggtgtccccgtcatctccggcgtcgacactcgtgccatcgtcacgtacctgcgtgagcagggctcctccctcgccaggatctcaattggtgacgaatacgatgccgacgaggacgaaggcttcgtcgaccctggtgccatcaacctggtcaagcgtgtgagcaccaaggctccgtttgtcgttgccaaccccaacgcgaccttccacatcgctctgatcgactgcggtgtcaaggagaacatcctgcgcagcctggtcagccgcggtgtttcggtcactgtcttcccttacaactacccgatccacaaggttgccgacaactttgatggcgttttcatttccaacggcccgggtgacccgactcactgccaggaaaccgtctacaacctggcccgcctgatggagacttcgtcggttcccatcatgggtatctgcctcggccaccagctgctcgctctcgccgtcggtgcccggactatcaagctcaagtacggcaaccgcgcccacaacattccggccctcgacttgaccactggccagtgccacattacgagccagaaccacggttatgccgttgacgccagcactctgccaagcgagttcaaggagtactttgtcaatctgaacgatggtagcaatgagggaatgatgcacaagacccgccccatcttctcgacccaattccaccccgaggctaagggcggcccgatggacagctcgtacctgtttgacaagtaccttgagaacgtgcagatgtacaaggacaacgccaaggtctaccgtgacaaccggccttcgcagctgatgatcgacatcctcagcaaggagcgtgtcggtgtcgagccttcgcctttggttgcgaatgctgcttga

SEQ ID NO: 3109 - protein, 459 aa, Myceliophthora thermophilia
MFASLAARLPNALGHAAPRAHLRLAGQARLLSRLAVDGSKGRAMPMTNRRATAAASGVDATLTIRDGPVFHGTAYGANSNISGEAVFTTSLVGYPESMTDPSYRGQILVFTQPLIGNYGVPSNERDEYNLLKYFESPHIQCAGVVVADVAEKYSHWTAVESLSEWCAREGVPVISGVDTRAIVTYLREQGSSLARISIGDEYDADEDEGFVDPGAINLVKRVSTKAPFVVANPNATFHIALIDCGVKENILRSLVSRGVSVTVFPYNYPIHKVADNFDGVFISNGPGDPTHCQETVYNLARLMETSSVPIMGICLGHQLLALAVGARTIKLKYGNRAHNIPALDLTTGQCHITSQNHGYAVDASTLPSEFKEYFVNLNDGSNEGMMHKTRPIFSTQFHPEAKGGPMDSSYLFDKYLENVQMYKDNAKVYRDNRPSQLMIDILSKERVGVEPSPLVANAA

SEQ ID NO: 3110 - DNA, 777 bp, Myceliophthora thermophilia
atgtcagcgctacggatactggtgcccgtcaaacgggttattgactatgcggttaagccgcgcgtcaacaagacgcaaaccggcgtcgagacggccggcgtcaagcacagcatgaaccccttcgacgagctctcggtcgaggagagcgtgcggatccgcgagaagaagagggcgcccggcggcgtcgaagacatctgcgtcttcaacgccggcccccccaaggcccaggacgtcctgcgcactgccatggcgatgggcgccgatcgtgccatccacgtcgaggtgaaggagggcgaggacctcgagcccctaaccgtcgccaagctcctcaaggcggcggccgagcagcagaagagcaacctcgtcatcctcggcaagcagagcatcgacgacgatgccaaccagaccggccagatgctggcgggcctgctggggtggccgcaggccacgcaggcgagcaaggtcgagttcggcgacggcgacacggtcagcgtcacgcgcgaggtggacggcggtgtcgagacggtgcgcgcgaaactgcccatggtcatcacgaccgacctccgcctgaacgagccgcggtatgcgagcttgccgaatatcatgaaggccaagaagaagccgctggagaagaagacgctggccgactttggcatcacggcggagaagaggctcaaggtgctcaaggtgacagaaccacccgccaggcaaggcggcggcaaggttgaggatgtggatggtctcatttccaagctcaaggagctcggcgctgtctag

SEQ ID NO: 3111 - protein, 258 aa, Myceliophthora thermophilia
MSALRILVPVKRVIDYAVKPRVNKTQTGVETAGVKHSMNPFDELSVEESVRIREKKRAPGGVEDICVFNAGPPKAQDVLRTAMAMGADRAIHVEVKEGEDLEPLTVAKLLKAAAEQQKSNLVILGKQSIDDDANQTGQMLAGLLGWPQATQASKVEFGDGDTVSVTREVDGGVETVRAKLPMVITTDLRLNEPRYASLPNIMKAKKKPLEKKTLADFGITAEKRLKVLKVTEPPARQGGGKVEDVDGLISKLKELGAV

SEQ ID NO: 3112 - DNA, 1173 bp, Myceliophthora thermophilia
atggcttccagggcgatgtgggaggtcgacccggagacgaggtccaaactcgtcgccatccaagccgaagccgataacaacctatgctgcgactgcaacgcgccctcgccgcaatgggcctcgcccaaattcggcatcttcatctgcctctcatgcgccggcgtccaccgcggcctgggcgtccacatctcgtttgtgcggtccatctccatggacgcattcaaggctgccgagattgagcgcatgcggctcggcggcaacgcgaactggaagcggttcttcgaagagcatgccgacaccaagatgaaggggctcacctgggacgacgcgaccatcgccgaacggtatggtggcgaggtcggcgaggagtggaaggagaggctgagcgccaaggtggaggggagggagtacgtgccgggggacaaggcgaacaaggcggccggcgggggcgggagcgtgcgcgcgagcccggcgccgagcgcgggcggctcgtcgacggcgccgacgaggagcggcccgggcgcagggacgccgctcagcgggagcaggagcgacagcccggcgccggggggtaagatcaaggtggacgtcgactactttgccaagctgggcgagcggaacgcgcagaggccggacgacctgccgccgagccagggcggcaagtacagcgggtttggcaactcggcgccgcggccgcggcgggatgagcaggcgctcccgggattggaggatctgcagaaggaccccgtggcggccatcacaaaggggctcggatggtttgcgtcgactgtcaccaagacggccaagacggtcaatgaggggtttatccagccgactgcgaaacagatatccgagtccgaattcgcagcacaagcccgcaacgcagcagcccaggcggcgcggaccgcgcaggccggtgccaggacagcgcaggaagggttccaccgctttgtcgagggtcccagcggaagcgggtacaggccggtaaatgccaacagcaacaactttgacgagagcaggcgggcgttctgggacgacttcgctgccgccgccgaccaacggaagactagtggaagctccataggcacgtcggcgatggggaagggcgggagacagggtggcgcgcaggccccggcaccaagcagtaagcacgatgagtgggatgactggtga

SEQ ID NO: 3113 - protein, 390 aa, Myceliophthora thermophilia
MASRAMWEVDPETRSKLVAIQAEADNNLCCDCNAPSPQWASPKFGIFICLSCAGVHRGLGVHISFVRSISMDAFKAAEIERMRLGGNANWKRFFEEHADTKMKGLTWDDATIAERYGGEVGEEWKERLSAKVEGREYVPGDKANKAAGGGGSVRASPAPSAGGSSTAPTRSGPGAGTPLSGSRSDSPAPGGKIKVDVDYFAKLGERNAQRPDDLPPSQGGKYSGFGNSAPRPRRDEQALPGLEDLQKDPVAAITKGLGWFASTVTKTAKTVNEGFIQPTAKQISESEFAAQARNAAAQAARTAQAGARTAQEGFHRFVEGPSGSGYRPVNANSNNFDESRRAFWDDFAAAADQRKTSGSSIGTSAMGKGGRQGGAQAPAPSSKHDEWDDW

SEQ ID NO: 3114 - DNA, 1287 bp, Myceliophthora thermophilia
atggcggggcaatttaggtatgcgctgcgggtatcgccgcagctcagaaccggctcaattcggctcttctcgtcgcaagcctgccttcgtcaagagattcgggatgcctacatcctgagcgcttcccgcacgccaacggcaaaattcaatggatcctatctgagcgttagcgggcccgaactcggcgctgttgccatcaagtccgcgctcgagaagtcgagagttcccgtttccaaagtcaccgatgtctacatgggaaatgtgctccaggcctccgttggacaggctccggcgcgccaagcctccgttttcgccggccttcctcccacagtcgaagcgattaccatcaataaggtttgcgcctctgggttgaaggccgttgcatttgcggcccagaatattcagctcggcctctccgaggcgcagatcgccggcgggtttgagaacatgtcgagggtgccatattacgtgccgcgtgctagcgggctacctagctttggtcatgtcaagatggaggatgggctcatcaaggacggtcttaccgatgtctacgaccagatccacatgggcaactgcgccgaaaacacggccaagaaatacaacatctcccgagaggagcaagatgagtacgccattcagtcataccagcgggcgcaggccgcctggaagaacaacgcgtttgccgacgagattgctccggtcacagttaaggggaagaagggcgatacggtcattaccacagatgaaggatacctggacatcaaactggaaaaggtgcccaccctcaagccggcgttcgtccgtgacgggaccggcaccgtgacggcggccaactcgtcaaccctcaacgacggcgccagcgcgctcgtcctaggcagcaaggcgattgcgcaggagtacggcgctggttcgcgtgtcctggctcgcatctgcagttcggccgacgcggccgtggatccgattgacttcccgattgcgccagccaaggcggtccccattgctttggagcgggcggggatcaccaaagaccaggttgccgtctgggagttcaacgaggccttcgccgcggttatcaaggccaacgagaagattcttggcttggagggtgcaagggtgaacccgcttggcggagccatctccctgggccatgccttgggcagctcaggttcacggattctggtgacgctgttgcaccagctcaaacctggcgagtatggtgttgcggcgatctgcaacggtggtggtgcggcaacggcgatggttgtgcaaaggatcgaatctgtgtaa

SEQ ID NO: 3115 - protein, 428 aa, Myceliophthora thermophilia
MAGQFRYALRVSPQLRTGSIRLFSSQACLRQEIRDAYILSASRTPTAKFNGSYLSVSGPELGAVAIKSALEKSRVPVSKVTDVYMGNVLQASVGQAPARQASVFAGLPPTVEAITINKVCASGLKAVAFAAQNIQLGLSEAQIAGGFENMSRVPYYVPRASGLPSFGHVKMEDGLIKDGLTDVYDQIHMGNCAENTAKKYNISREEQDEYAIQSYQRAQAAWKNNAFADEIAPVTVKGKKGDTVITTDEGYLDIKLEKVPTLKPAFVRDGTGTVTAANSSTLNDGASALVLGSKAIAQEYGAGSRVLARICSSADAAVDPIDFPIAPAKAVPIALERAGITKDQVAVWEFNEAFAAVIKANEKILGLEGARVNPLGGAISLGHALGSSGSRILVTLLHQLKPGEYGVAAICNGGGAATAMVVQRIESV

SEQ ID NO: 3116 - DNA, 456 bp, Myceliophthora thermophilia
atgtcgaccgctgcgcgccgccgtctgatgcgagacttcaagcgcatgcagaccgatccgcctgctggcgtctccgcatctcccgtccccgacaatgtcatgacttggaacgctgtcatcatcggtcctgcagacacccctttcgaagatggaactttcaggctcgtgatgcacttcgaggaacagtatccaaacaagcccccgtcggtcaaattcatcagccagatgttccatccgaacgtttatgccacaggcgagctttgcctcgacattctccagaaccgctggagtccaacctacgacgttgccgccgtgctcaccagcatccagagcttgcttaacgaccccaatactggatcccccgcaaatgtcgaagcgtccaacctctacaaagataaccgcaaagagtatatgaagagggtgagggagacagtggagaagagctgggaagactag

SEQ ID NO: 3117 - protein, 151 aa, Myceliophthora thermophilia
MSTAARRRLMRDFKRMQTDPPAGVSASPVPDNVMTWNAVIIGPADTPFEDGTFRLVMHFEEQYPNKPPSVKFISQMFHPNVYATGELCLDILQNRWSPTYDVAAVLTSIQSLLNDPNTGSPANVEASNLYKDNRKEYMKRVRETVEKSWED

SEQ ID NO: 3118 - DNA, 1362 bp, Myceliophthora thermophilia
atgccaccaaagaaagggagtgtcggccgcaaggctgcaaacaaagtaaccaagcccgcgtcgaagaaaacggcctcgggaagtcgagtcaggagtgaccgaattgccgctgcggccgacgaagccgcagagggagcgactgggaaggggccaggtcgccgagggcgcaaagccgcggcggccaccgctgggccagaacatggagaccaagatgacacgaccatgacagatgcgcccgaaacaaccgagtcgcctccaccagcgaagccgaagggtgcccgtggccgccccaagaaggcggctttggaagccgaaccacagcccaccggggcgcggcggggaagaaagccaacagcaaagacggccgagcgagacacgacagcagaggaagtatcagagatccccgagacacagcaaccgaccgcgccgcagagtgacagcgacgctgggcgcgacgattcggcggagacgcccggctcgcagaccccagaacggccaaggccgggtggtggcggcgcccctccccccggcagcgcgttgaagaaggctgtaaactccctgtccccggaaaagggcgatcccgcattgcgtcggcggctcggagagatgacacagaaatacgaagccctcgagcgtaaatacaaagacttgaaggagattgcggtacgagaagcagaacgcaactttgataggctcaggaaacagtccgaggagaaatcaaaagccgccgaccaactcatcgcaggcctcaaagctgagcttgccgcccagaaagaagcctccaaagagagcgcacgcctcaagaagcagctcgaagcgagcgaatcaaaagccgactccctccaaaccaaaatcaccgagctgaccgcctccctgaacgactccaaatcggagatcaaatccctcaacctcaaactgtccgcggcgcgcagcgcagaagcagctgcgtccgcagccgccaaggtgcccgggagcgcgatgaagggctcaaccgccacctcgcgcctcgcggccgccaacgccaccgaggccacgctcacggcacagaagaaagaggacctctacagtgacctgacgggcttgattgtgcgcagcgtgaagcgagatggcggcgaggacgtgtttgactgtatccagaccgggaaaaacgggacactccacttcaagctcgcaatcgacgttcaatccgggcaaggcgaggcacactgccactacacgccacagctggatcctaatcgagatagggcgttgatcgccgttttaccggggtacctcgtcgacgagatctcgttcccacagacacaggcgggcaaattctatgccagggtcctcaaagcgttgaacgaggcggcggagggttga

SEQ ID NO: 3119 - protein, 453 aa, Myceliophthora thermophilia
MPPKKGSVGRKAANKVTKPASKKTASGSRVRSDRIAAAADEAAEGATGKGPGRRGRKAAAATAGPEHGDQDDTTMTDAPETTESPPPAKPKGARGRPKKAALEAEPQPTGARRGRKPTAKTAERDTTAEEVSEIPETQQPTAPQSDSDAGRDDSAETPGSQTPERPRPGGGGAPPPGSALKKAVNSLSPEKGDPALRRRLGEMTQKYEALERKYKDLKEIAVREAERNFDRLRKQSEEKSKAADQLIAGLKAELAAQKEASKESARLKKQLEASESKADSLQTKITELTASLNDSKSEIKSLNLKLSAARSAEAAASAAAKVPGSAMKGSTATSRLAAANATEATLTAQKKEDLYSDLTGLIVRSVKRDGGEDVFDCIQTGKNGTLHFKLAIDVQSGQGEAHCHYTPQLDPNRDRALIAVLPGYLVDEISFPQTQAGKFYARVLKALNEAAEG

SEQ ID NO: 3120 - DNA, 1620 bp, Myceliophthora thermophilia
atggcgaccaatcccatgcacaacctgacaaccctgattaagaggctcgaggctgccacgtctcgcctcgaggacatcgcacaggcatccttcgaacaatacaactctacacccaccccccctcagcacgcaggcgtcgctgccggccctcctgcccctgcatcccccgccccgccccaacccgcgacagcgcctagtccgcccgccgccgcccccgagcccctccccgagtttatcgaagaatttgacaacctcgtcgaccagtcgcttgccaaatggctcaagattagcaacgatgtgggcggcgtagttgccgagcaggccgtcaaggttgtcgaggcgttcaaggaagagcgcaagttcctgctcatcacgaccaaggcgaagaagcccgatctccagggcgccgacatggctgttttccaggacctcgtgaagccgatcggcgccctcatgacggctgtcgggaacatcaaggacctgaaccgcggcgacaagcactacaataacctctgcaccgtggccgagagcatcatgggtttggcctgggtgacgatcgacgtcaagccgttcaagcacatcgagggaagccttgccgccgccgagttctggggcaacaagatcctgacggccaacaagaacaaggacgagcagcagatcgaatgggtcaaggcattctaccaggtcttccgcgacctcaccgactatgttaagaactacttccccaacggcattccctggaacccgaagggcgtgccggcggccgaggccgccaaggccgtcaactcggcatcccctgccccggcagctccctcacctagcggtgctcccgctcccgctcccggcccccctcctccgccgcctccgccgggcccgccccccgtccttaagatcaacgagcaaaagtcggagccgagcccggcaagcggcttcagcgccgtcttctcggaactgaacaagggtgaggcggtcaccaagggtttgagaaaggtggacaagtccgaaatgacacacaagaacccatctctgcgcgccgggtcgaccgttcccgaccacggttcctcggttcgcggaaagagccctgcgcccccgggcaccaagcccaagcccgagagcatgcgggtcaagaagccgcccaagaaagagcttgaaggcaacaagtggacaattgaaaactttgacaagtcacccgagcccatcgaggttgaggtctccctgacgcactcgatcctcatctccaagtgcaacaatgctactatcatcctcaagggcaaggccaacgcggtgacggtcgagaacaccaaccggatctcgctcattgtcgagtcgctcgtctcgaccgtcgacgtggtcaagtcgcagaacttcgccctacaggtcctcgaaaccatcccgaccattctcatggaccaggtcgacggtgcccagatctacctgagcaaggagagctcctctactcgcgtctactcgagcaagtcggcgagcatcaacctcaacgtcctcaccggcgacggcgacgacgccgactacaaggagctcccgttgcccagccagatctgctcctggtgggacgagggcaagggcgaggtagtgaacgagatcgtctcccacgccggttga

SEQ ID NO: 3121 - protein, 539 aa, Myceliophthora thermophilia
MATNPMHNLTTLIKRLEAATSRLEDIAQASFEQYNSTPTPPQHAGVAAGPPAPASPAPPQPATAPSPPAAAPEPLPEFIEEFDNLVDQSLAKWLKISNDVGGVVAEQAVKVVEAFKEERKFLLITTKAKKPDLQGADMAVFQDLVKPIGALMTAVGNIKDLNRGDKHYNNLCTVAESIMGLAWVTIDVKPFKHIEGSLAAAEFWGNKILTANKNKDEQQIEWVKAFYQVFRDLTDYVKNYFPNGIPWNPKGVPAAEAAKAVNSASPAPAAPSPSGAPAPAPGPPPPPPPPGPPPVLKINEQKSEPSPASGFSAVFSELNKGEAVTKGLRKVDKSEMTHKNPSLRAGSTVPDHGSSVRGKSPAPPGTKPKPESMRVKKPPKKELEGNKWTIENFDKSPEPIEVEVSLTHSILISKCNNATIILKGKANAVTVENTNRISLIVESLVSTVDVVKSQNFALQVLETIPTILMDQVDGAQIYLSKESSSTRVYSSKSASINLNVLTGDGDDADYKELPLPSQICSWWDEGKGEVVNEIVSHAG

SEQ ID NO: 3122 - DNA, 2409 bp, Myceliophthora thermophilia
atgccagaggtcaaagtcgggtttccagttgccgaggagttttcggtggcgcgcatcacggaccacgtatggcttctccgcagattccgcgccctgttcaaccacgtcgaatcgccggggcgccacgattccaactattatcccgagccgcccccaggcaatgaggtgtcgtctcggaacgccgcgggccagtggagggtccaggcgttcttgatgaacgccgaggtgcggtattcgttctacctccgcctgttgcgggagtgggtcgtcaaggacgacgccgacaagccggacacccacgacgacagctccgacggcgacaaccgggaggatgacggctgggctgccagctggccgctgcccccctgggacgtggccctcgtgttctacatccacatgctctccccggagcggttccggaaggacatggcggccgagtacccccctctctggcacgcccgcctctctttcccgctcgccaggctcaggcagcacccacgcggccacgaggcctcgcagcgcaagtgggagaccatgttccccgacatcccataccggctcttcgagttcgagcccgacggcgagaccccgcgcctttcgaccagcatcgggcgccccctcgacgtccgcggctacaagtgcggctccgacgactgcaccgccaacacgcggaggaacaggtgtcggatcatcatccccatggccgagtggtccgcctaccggctgggcaagcgacgctccccaacgtgcccctcgtgcaggatggccttctcgtcgcagcgggcggggtacaactcggcctttgcgcgcttctgcgaggccgtctttggccagcacgtcttggggctctgggatgctccgctccgccagatggcgtttgtagatcggatcctggccgaaaccacgacggcgacggcgacaacgaccaacacggccgccggcggcagctccaccaccatcacgttctccccggcccaggtgcccgcctggcaggcccgctacctcaagttcctcggcctcatcaaggcccaccggtccaccaccttcgtcccgaccctcgacatcgacctcgtctggcacacgcaccagctcgccccggccgcctacgacgcctactgccgcgcccacgtcggccacccggtcaaccacgacgacaccatccccgccgccggccgctccaccgccctcgacgacaccaagcgcctgtggaccctagcgtaccgcgagctctacctcgatccggactcgggcgacggcgacggcggcggcggcggcggcggtggcccgggggcgcaggcggaaggaggagaagaagaaagaggagagcggagcggcggcaactcgaaacggggaggggaagaagggcgggggaatggacgacaacacagcggatggcgaacgtgcgcgcgttgctgctgctggagagggtggcggagttggagacttgcctcgccgacagagagcggcggttggccgcgttcgacggcgcggggacgatcgagacgcggcgcgccgacgcggagcggaaccggcggcggcggctggtcgagcacaaccggtggactcggctgcgggacgagcacagcacgctggccggcgcgcctgcggggggcgaagaaggcgcgggacggcgtccggccgctgctccgggtcggacggtggtggcggtggtacccgcgctcgcggcgcgaggagctggcgaggcgggaagccgccgtgcgcgaggtcgaggcccgggcgcgggctaagctcgacgaggtcgagcggcagcgagaggtcgccgacgaggcggcggagcagtcccggctggctgacgagcgcctgcgccgggcggaggccgaccgcgtccggctcgaggtcgagctcgacgggcgcgtgatcgcggccgagaagaaactcgtgcgcgactgcatccgccgcgccgaccagctgaggggcgaccccctcggcgaggggatgctgagcgtcgtgccctccgaggcccagatcaggcccgccccgctggtcgggaactgggaccgcgagacgacgaccgagcgggcgtggccggtgaggtgttggggaacccggcccggggccgggaccgctgcttcaacgtaccactccacctggaggccggaccgcgaagggggaggctccttcggcgggttggcctttggatccgacgtttacggcagttatgaagggtgcggcggtgacggatggggcgggtccggcggtggtggtgatggtggtggtggtgggggttctagcggtggtggatgcggcggtggcggcggtggtagcagtggcggggaggcggaggaggaggaggaggcggttgcggaggaggaggagggggagggggctgtggagggggctgtggcggtggctgctgaggatgatgagagtctcgattgtttccgttaa

SEQ ID NO: 3123 - protein, 802 aa, Myceliophthora thermophilia
MPEVKVGFPVAEEFSVARITDHVWLLRRFRALFNHVESPGRHDSNYYPEPPPGNEVSSRNAAGQWRVQAFLMNAEVRYSFYLRLLREWVVKDDADKPDTHDDSSDGDNREDDGWAASWPLPPWDVALVFYIHMLSPERFRKDMAAEYPPLWHARLSFPLARLRQHPRGHEASQRKWETMFPDIPYRLFEFEPDGETPRLSTSIGRPLDVRGYKCGSDDCTANTRRNRCRIIIPMAEWSAYRLGKRRSPTCPSCRMAFSSQRAGYNSAFARFCEAVFGQHVLGLWDAPLRQMAFVDRILAETTTATATTTNTAAGGSSTTITFSPAQVPAWQARYLKFLGLIKAHRSTTFVPTLDIDLVWHTHQLAPAAYDAYCRAHVGHPVNHDDTIPAAGRSTALDDTKRLWTLAYRELYLDPDSGDGDGGGGGGGGPGAQAEGGEEERGERSGGNSKRGGEEGRGNGRQHSGWRTCARCCCWRGWRSWRLASPTESGGWPRSTARGRSRRGAPTRSGTGGGGWSSTTGGLGCGTSTARWPARLRGAKKARDGVRPLLRVGRWWRWYPRSRREELARREAAVREVEARARAKLDEVERQREVADEAAEQSRLADERLRRAEADRVRLEVELDGRVIAAEKKLVRDCIRRADQLRGDPLGEGMLSVVPSEAQIRPAPLVGNWDRETTTERAWPVRCWGTRPGAGTAASTYHSTWRPDREGGGSFGGLAFGSDVYGSYEGCGGDGWGGSGGGGDGGGGGGSSGGGCGGGGGGSSGGEAEEEEEAVAEEEEGEGAVEGAVAVAAEDDESLDCFR

SEQ ID NO: 3124 - DNA, 873 bp, Myceliophthora thermophilia
atgtccttcgatcgcctcgttcgtttcgtgcccaagggcgacgatagcaagatcctcatcggcgagccggccgacagctctgttgatgtcggcgccgccgtccgcaagggcgaggacgtgcaagtcaaggtgtacagcggcaagtcggtgctggacgccggctcgccaacaggcgagacagccatcatcggtcgcattctctcgcctctagcccaggaggaggttgggactatccgctgcatcggactgaactacaagaagcatgccgaagaggccaaaatgagcatccccgagattcccaccgtcttcctcaaaccggcaacttccctcgccgatccctacccggccccgactatcatccccaagcacacaatcgccagcgactcggccgactacgagtctgaactggccatcgtgctgggtaaggaggcgaagaatgtctcggaagccgacgcgctcgactatgtgctggggtacacggcgagcaacgacatttcgagccgggcggcgcagtttgcccagacgcagtggtgctactccaagggcttcgacggcgcctgcccgattggtcctgtgcttgtgaacaagcgcctggtgccggacgtgggaaagctgaggttgagggggttgaagaatgggaaagtggtgcaggatagcgcgttgaccgatctgatcttctcggtcgagcagattgtcagcttcctctcgcagggcacgacgctccccaagggcacacttatcatcacaggcacgccggctggtgtcggtttcgcgcacaagccccaggagttgctgcacgatggggatgaatttgtcgtggagatcctgccacatatcggaagtttgtacaatgttatgcggaacgagaaatga

SEQ ID NO: 3125 - protein, 290 aa, Myceliophthora thermophilia
MSFDRLVRFVPKGDDSKILIGEPADSSVDVGAAVRKGEDVQVKVYSGKSVLDAGSPTGETAIIGRILSPLAQEEVGTIRCIGLNYKKHAEEAKMSIPEIPTVFLKPATSLADPYPAPTIIPKHTIASDSADYESELAIVLGKEAKNVSEADALDYVLGYTASNDISSRAAQFAQTQWCYSKGFDGACPIGPVLVNKRLVPDVGKLRLRGLKNGKVVQDSALTDLIFSVEQIVSFLSQGTTLPKGTLIITGTPAGVGFAHKPQELLHDGDEFVVEILPHIGSLYNVMRNEK

SEQ ID NO: 3126 - DNA, 1557 bp, Myceliophthora thermophilia
atgctcccaatcgcatcaacggggtccaaggtgatcccccgccatcatgttggcggctattcggatgggtacccgcggggcaagaccttcgacatctctcctcacaggtaccaaccccggagcgcaaactcggtccaccgcaaacgaacccagtcgttcgtgcgcctcggcatcgtagccgcgatcctcttcctcctcatgctgtacaccttatcgcgcgggtcgtcgtcgtcgtcttcctcgggtgccctctccgtcctgtccctggggctcctctcctcgggcgacaccgacttcgagctcgagacggtgcgctactacgacctgtccaacgtgcagggcactgcgcgcggctgggagcgcgaggagcgcatcctggtgtgcgtacccctccgcgacgccgaggcccacctgcccatgttcttctcgcacctgcgcaacctgacgtacccgcaccacctgatggacctcgccttcctcgtgtcggactccaaggacaacacgctcggggtgctgaccgagaacctggagaagatccaggcgtccgaggacgagtcgatgcactttggggagatctccatcatcgagaaggactttggccaggtggtgaagcaggacgtcgagagccgtcacgggtttgcggcgcaggcgggcaggcggaagctcatggctcgggcgaggaactggctgctgagcgcggcgctgcggccgtaccactcgtgggtgtactggcgcgatgtggacgtggagacggcgccgttcaccatcctggaggatttgatgcggcataacaaggacgtgattgtgcccaatgtctggcgcccattgccggaatggctcggtggagagcagccatacgatctcaactcctggcaggaatcggaaacggctctggcgcttgccgatacccttgatgaagatgccgtcatcgtggagggctatgccgaatacgcgacctaccggccgcatctggcgtacctccgtgacccctacggcgatcctgacgtagaaatggagctggacggtgtcggcggcgtgagcatcttggccaaggccaaagtattccgctacggtgtgcatttcccggcgtttagctttgagaaacacgccgagacggaaggattcggcaagatggcccggaagctgggactctcagtcattgggttgcctcattacactatctggcacgcgtatgagcccagcgtggaggatatcaagcacatggagcaattgaaacgagaacagctcgctcaggaacaagccgagaaggagaaggcagagaaggccaggaagatgaaggagtcctttagcgatgctactgggcagtgggagaaggacaaggcagaattgcaaaacatggccacccgagagaagaagaaggaagaagctgctgctgctgccgccgacaacaaggtcgacgctgcccctgcagtagagcaagtgtccaacgacaacgcgggtgcgaaagagggaggtggcaggatgaaagagaaggtcgtcgtcgaggtagacgaggagcttggtggtggcaaggcaggaaaggcaggaaacgcatga

SEQ ID NO: 3127 - protein, 518 aa, Myceliophthora thermophilia
MLPIASTGSKVIPRHHVGGYSDGYPRGKTFDISPHRYQPRSANSVHRKRTQSFVRLGIVAAILFLLMLYTLSRGSSSSSSSGALSVLSLGLLSSGDTDFELETVRYYDLSNVQGTARGWEREERILVCVPLRDAEAHLPMFFSHLRNLTYPHHLMDLAFLVSDSKDNTLGVLTENLEKIQASEDESMHFGEISIIEKDFGQVVKQDVESRHGFAAQAGRRKLMARARNWLLSAALRPYHSWVYWRDVDVETAPFTILEDLMRHNKDVIVPNVWRPLPEWLGGEQPYDLNSWQESETALALADTLDEDAVIVEGYAEYATYRPHLAYLRDPYGDPDVEMELDGVGGVSILAKAKVFRYGVHFPAFSFEKHAETEGFGKMARKLGLSVIGLPHYTIWHAYEPSVEDIKHMEQLKREQLAQEQAEKEKAEKARKMKESFSDATGQWEKDKAELQNMATREKKKEEAAAAAADNKVDAAPAVEQVSNDNAGAKEGGGRMKEKVVVEVDEELGGGKAGKAGNA

SEQ ID NO: 3128 - DNA, 858 bp, Myceliophthora thermophilia
atgacagacaggaggcgtatcaatggccctgccggagccacaattccgccaatctacgatgattcagacctccaggagcccagatccgcaaagggcaggtcgcgtgctcccaatgcgtcccggaaaatgttcctcaaaaccggcgtgaccccttcggcctctggatccgcctatctggagatggagacttcagcaacgcctggtgtctctgggctgaagcttagttgctcggttcatgggccacgctcacttccgagatccgccccattctcacctcacatcatcctgtcaacccatgtcaagtacgctccgttcgcgaccaagcagaggcgtggttatcttcgcgaccctagcgagcgggaccttggcatccacctcgagactgctctccgtggcgccatcattgccgaccggtggccgaaaagcggtgttgacattattgtctccatcgtcgaaggcgatcaagatcgggaagcgtccaagttgcagggcgacgaggtgtgggacatgatgaacgccctgagcgggtgcattaccgtggcagcagccgcacttgccgatgcgggtatcgactgtgttgatacggttgccggtggagttgctgcccttgtccaagacagcggcgaggacactccgagaatcgtcgtcgatcccataccttcggagcacgagaagatattggcagcctgctgcatcgcatacctgccgaaccgagacgaggttacaaatctctggttcagaggggacctccccgcctcggacacggatctctacacaagtctcgtcgagaaaggcatccaagcctcgaagaacgctaatcgcgtcctcgtcagttgcctaagcgagacgcttcaatga

SEQ ID NO: 3129 - protein, 285 aa, Myceliophthora thermophilia
MTDRRRINGPAGATIPPIYDDSDLQEPRSAKGRSRAPNASRKMFLKTGVTPSASGSAYLEMETSATPGVSGLKLSCSVHGPRSLPRSAPFSPHIILSTHVKYAPFATKQRRGYLRDPSERDLGIHLETALRGAIIADRWPKSGVDIIVSIVEGDQDREASKLQGDEVWDMMNALSGCITVAAAALADAGIDCVDTVAGGVAALVQDSGEDTPRIVVDPIPSEHEKILAACCIAYLPNRDEVTNLWFRGDLPASDTDLYTSLVEKGIQASKNANRVLVSCLSETLQ

SEQ ID NO: 3130 - DNA, 2160 bp, Myceliophthora thermophilia
atgggcagaaagtggcgatggggcgtcatcttggacgccggctcatctggaactcgactacacatttaccgatggaaagatcccgagaaggcgctccagagtgcaactccggaggatctgcgcaacctcccaaagctggtgactgataaggactggactaagaagatcaggcctggggtgtcgacttttgctgataaggcggaggatgtcggaccaaaccatctgcaggtgttggtcgaccatgcgctcaaagtcataccgaaggacaaggtcgaagatacgcccatctttctcatggcgacagcagggatgcgtctgctgccgcaagcccagcaaagggccttgacgagcgagatatgttcctatctccggcagaacactcggttctcgctcccagactgcgacctacacatccaggtcatcaagggcgaaacggaaggactctatgggtggatcgcgtcaaactacctcttgggcggattcgatcacccagacaagcatcaacatggcaagggccatcacacttacgggtttctggacatgggcggcgcatcagcacagatcgcgttcgcgccgaatgcgactgaggctgaaaaacacgcaaacgatctcaagctgctgcgcttgcgcacgctcgatggataccctgcggaatacaaggtcttcaccacgacatggcttggtttcggtgtcaaccaagcgagggaagcatatgtcaagaatctccgggagcggtacgcggagaccgagatggaattacccgacccatgtctgccgagggggttgcggacaactctgggtggtgacccgttagagaagcgggagtccggcatgccaacgttaatcggcaccgggcagtttgacgagtgtctgcagctgacctatcccttgctcggcaaggacaagccttgtgaagatagcccctgcttgctgaatggtcaacatgctccggccatcgacttcgacgtgaatcatttcatcggcgtctcggagtattggcatacgacacacggtgtgttcggcggcaaggacgacaaggcgtatgacttcgcgtcctatcagcggcgagtgaaggaattttgcggccgtgattgggatcagatcaaggcaaagacgaatagcctaaaaggggatggaataaaagttgctcaggaggcttgtttcaaagcctcttggctgctcaacgtccttcacgaagggattggtgttccccgaatcggccttgaggatgtgccaacggcgaatgcgtccaagggcgctctcgagcacgccaaagagagggggtttctccagcccttccaaccagtcgacaagattgacggtatcgaagtgagctggacgctcgggaagatggttctctacgcggctgggcaaataccgccggccacgcgtgacggccggtatcccgtcggtttcggcagcaacgtggaagggactccgtacgactttcagttcgcaggctccagttggaaacccattggcaaccaaaccagcgaagccgacgatgactgggagcttaacgccgaagacattctcgacaaggcgaaatccaagtccacaagcttcttcttcgcatttgtgttctttctgttcctctttctctacttcttccgcaaacgcgagcggcgcatgcgcctctacagccgcttcagccaagtcatccggcggcagcgcaagccagggcacagcaatccgcgcaagaacgggggcggtggcgggacgcgcgccctgtccgggctcgcgaccaaattctttggcggtcgacgaccctcgtggggcggcgcatacgagcgcgtcatggaggaaggcgaggccagccgctttgagctgggcgaggtagagtcggatgacggccacgagtactcggactcgagcgacgggctgtcggcgctctcggccaaatcggcgtcatccaggcggttcggcctctcgtctgggctgtctacgccgcaagtcgtcgaccatcatcattaccaccacggcctggcgtcgccaaccgtgacggcgctggaccggagcgggctggtggtccggaccgagagccgcgagcggttgacgctctcgccgcatctggcgatgtctggcgttggcaggaggagtagggcgggaagcccgacgcggctcaagagcccgctgatgtcccccctgcaggagtcgtag

SEQ ID NO: 3131 - protein, 719 aa, Myceliophthora thermophilia
MGRKWRWGVILDAGSSGTRLHIYRWKDPEKALQSATPEDLRNLPKLVTDKDWTKKIRPGVSTFADKAEDVGPNHLQVLVDHALKVIPKDKVEDTPIFLMATAGMRLLPQAQQRALTSEICSYLRQNTRFSLPDCDLHIQVIKGETEGLYGWIASNYLLGGFDHPDKHQHGKGHHTYGFLDMGGASAQIAFAPNATEAEKHANDLKLLRLRTLDGYPAEYKVFTTTWLGFGVNQAREAYVKNLRERYAETEMELPDPCLPRGLRTTLGGDPLEKRESGMPTLIGTGQFDECLQLTYPLLGKDKPCEDSPCLLNGQHAPAIDFDVNHFIGVSEYWHTTHGVFGGKDDKAYDFASYQRRVKEFCGRDWDQIKAKTNSLKGDGIKVAQEACFKASWLLNVLHEGIGVPRIGLEDVPTANASKGALEHAKERGFLQPFQPVDKIDGIEVSWTLGKMVLYAAGQIPPATRDGRYPVGFGSNVEGTPYDFQFAGSSWKPIGNQTSEADDDWELNAEDILDKAKSKSTSFFFAFVFFLFLFLYFFRKRERRMRLYSRFSQVIRRQRKPGHSNPRKNGGGGGTRALSGLATKFFGGRRPSWGGAYERVMEEGEASRFELGEVESDDGHEYSDSSDGLSALSAKSASSRRFGLSSGLSTPQVVDHHHYHHGLASPTVTALDRSGLVVRTESRERLTLSPHLAMSGVGRRSRAGSPTRLKSPLMSPLQES

SEQ ID NO: 3132 - DNA, 3099 bp, Myceliophthora thermophilia
atggacgagacggctgttccggaggctgtggcagcagcactccctcgtgcactggataatacgagcgcctggcacaacttcacaatgtggacggcacaacactttgcgcttgcaatgaacatgacaaagctggcgccgtcgctggaggatctcgtctgggcaggcccgcgcatggtcatgaaactaggcaggctgggctccttcatctcgtttccagacgccattgacggctttggccaaagagccgtacctaattcgaccaacgtcgacatcttctcctcttcctccttctcctcctccctctcctcagacacgggaatggttgccgacctcatcgaaaccctcgcgcagtccacaaacactgcatttcccacatctacgatggattccgcctccggcgccgccgccgccgccgccgccgctgccgatgatgttacccaaaatcccaacgctttcgtctcgcgattttctatggaaggtgcaaggggacttggaggtgtcttcagctacgccaccagcaagtgggcgctctgctgtatcgcaatggccgtcatattcaaccgcacgcacatctttgcagccacccgtcgcagacttcgactccgatggcacgtccgactgctgctacgggccgctcccgtgatacttctgctcctccaggccaggtggctcctgcagtcgatacagtgccaaacctccgccgacttctccgagctgcgctggggaaatgcgtccaagagctccgacctgatgtttgcgcagccgaatcctttcctcaaccggctcagctcatccctgctgttcggtgcgtccgacgaggagtcgtgccgcgccatcaaaatggtgccctgggacgacagggagcagccagagctggtggggtctctttccaggctttggccgctctttgggacctactgcttgagccactttgtagaggtgctatcttgcgcagtgcaaggtcgccccgtggctgccgagacgggcatgacactctttgagcattccctggccttcgcggaggcagatgcggccattagcaatcagctgggatggggtcttttcaccaacggcactgccgcctcgcaggctgcgctcgggtctaagatcgccctcactcggtccatgatattgaagcgcgttaacaccccgcccgaggtgctgctggtggccttcttgtccgccatgagccatgtcacgagccacatattgggcatcttcaacttgcagtccaagtttcgcctcgttagcaccggcttctggggcctctgctttatgtcgagcctcctctggagcgccctgaatttctcggtcgatgacccttcgacccaggggttgctgcgcttcccgactgtctgcatcatcggtttcatcccgcacatactgatcctgtttgggatttacgcctgcggactggtctatgcctcggccctggcgctttcggccatttccccaccggaaggtgcccccgatggggaacagcgctctctccggcagcgtcttcggcaggcccatgccaacatgcaagcaaatgtgtctctttccgagatccgcatccgtatggacatggacttctatacggccctgctgcgcgctggcttcggtgccattacgatggcgagcgaggccgtctatttcaatgaggaccaccaggtgaacctgaagaaatatacatggttagaagaagaaaggttccgtgagttagaggagcttcgaatgcagtggatcggcggcggcattccgggatcgcgatttgactcggttggaaccattggtctcgttcccgtcaagaacgggcaggcgaatgctacgagcggctacgcgagagagaaggcagctcagcaaatccccaaaagcaacgcttccagcaggagggtgcgcgacggcgtcggcgccgcagagcggagctcgaggtggctcatagcgttcgagtacgtgctgcatatctccaagctgatgattgtcgtgtgggccttgatgaccatcaagaccatgtcgctgttcgggttgcgcacgccccctcgatggctccggggcctgtcgcagcgacccaagtccggatcatcatccaaaaagtctgggagtcgcggccgtacgaggagcgccgatgtgctgtctcttgccgatggccgcgtctccttcgcggtcactcggaacgatgaagtggatgtggaggcagaactacgccgccgaatggaggagaattatgcacaagcagaagctggcgagagaaagcccgacgaagccgagtttgactcggagctgtacaatcacttcctcaggggcggctggtgggggaacagcgactccagcggcgactacgttcctccctcccaacattcgggaagcggcgccgacgagactgatgtggatgacaccacgagcatcatctccaccaccgaaaccacgagcgagctggattgggaatccgaccacgacggcgacgctctcagcgatggacagcgaaccccgacccagcaaaacccggcccctatttcttccttcgcctcagcggtagcatcggcccgcgcctcccgcgaatccaccccgctcttcgatacccccatagcagcgcaggacctggcccgcctgctgcacccccggacccccgaggaccgcgacgaagcgcgcgccctggccgcgcacctcagcagcgacggcatcatgacgcgctcgcgctacaagcagcaactccagcgccagcgcacccaggtgctcctcaccagcagccaggtcccctcctccgccgccccggagaagatgacgcccgaggaggaagcccgcgtgctcgaacagctgctcctgtcccgccgcgccggcaagtccgggcggtccgccggcgcgtccgggtcccagtcgggcgagggaggagcagcgggccaagcgagctcgacctgggcgacgggcgccgcgggcctgggccctgacgggccgcagtgcgtcgtctgccagagcgccccgcgcaccatcatcgtctggccgtgccgctgcctgagcctctgcgacgaatgccgggtgtcgctggccatgaacaatttcgacaagtgtgtgtgttgtcgccgggaggtgatcagctttagtcggatctatgtaccctaa

SEQ ID NO: 3133 - protein, 1032 aa, Myceliophthora thermophilia
MDETAVPEAVAAALPRALDNTSAWHNFTMWTAQHFALAMNMTKLAPSLEDLVWAGPRMVMKLGRLGSFISFPDAIDGFGQRAVPNSTNVDIFSSSSFSSSLSSDTGMVADLIETLAQSTNTAFPTSTMDSASGAAAAAAAAADDVTQNPNAFVSRFSMEGARGLGGVFSYATSKWALCCIAMAVIFNRTHIFAATRRRLRLRWHVRLLLRAAPVILLLLQARWLLQSIQCQTSADFSELRWGNASKSSDLMFAQPNPFLNRLSSSLLFGASDEESCRAIKMVPWDDREQPELVGSLSRLWPLFGTYCLSHFVEVLSCAVQGRPVAAETGMTLFEHSLAFAEADAAISNQLGWGLFTNGTAASQAALGSKIALTRSMILKRVNTPPEVLLVAFLSAMSHVTSHILGIFNLQSKFRLVSTGFWGLCFMSSLLWSALNFSVDDPSTQGLLRFPTVCIIGFIPHILILFGIYACGLVYASALALSAISPPEGAPDGEQRSLRQRLRQAHANMQANVSLSEIRIRMDMDFYTALLRAGFGAITMASEAVYFNEDHQVNLKKYTWLEEERFRELEELRMQWIGGGIPGSRFDSVGTIGLVPVKNGQANATSGYAREKAAQQIPKSNASSRRVRDGVGAAERSSRWLIAFEYVLHISKLMIVVWALMTIKTMSLFGLRTPPRWLRGLSQRPKSGSSSKKSGSRGRTRSADVLSLADGRVSFAVTRNDEVDVEAELRRRMEENYAQAEAGERKPDEAEFDSELYNHFLRGGWWGNSDSSGDYVPPSQHSGSGADETDVDDTTSIISTTETTSELDWESDHDGDALSDGQRTPTQQNPAPISSFASAVASARASRESTPLFDTPIAAQDLARLLHPRTPEDRDEARALAAHLSSDGIMTRSRYKQQLQRQRTQVLLTSSQVPSSAAPEKMTPEEEARVLEQLLLSRRAGKSGRSAGASGSQSGEGGAAGQASSTWATGAAGLGPDGPQCVVCQSAPRTIIVWPCRCLSLCDECRVSLAMNNFDKCVCCRREVISFSRIYVP

SEQ ID NO: 3134 - DNA, 714 bp, Myceliophthora thermophilia
atggtgcccctcgtcagcgtcttccggcaatggggcaacccgcgcgtgcccgagtggctcaagcagatcgaggccgtcctcgacctgctcgagatcatggaggagtggtcgctggccgcccgccgctcgcgtgaggtcgtctggcgcatgtacgaggccgcccgccagctcgtcgagcagcagcgcgccagcgcctccccgagcatccaggtgctcgccggcggcgccaccgccgacggcatgctcatgcccagccccggcgccgccgaggctgccggcatgcacatgagccccatcggcctggagcccgtcgacgggctcggcctcatgggcctcctcgaccagggcggcctgtggggggatttggacggcatgtactggacccagccgggcgggccatccccccctcccgcaccgttaaccccgcaacaacaacaacaccaacagcaacaacaacaacaacaacaacaaccgccgcacattagcctcggcagccccgtggatgagtcggcatgcatggcggcggcggcggcggcggcggcggaatttgccgcctaccacagccccgtcgtcaccacggccggcggcggcgtcgccagcccgcacgacaccaacggcatggtccacgccgttgactacagcggcctcatgggccatcctcaccaacctcctcatccccaccagcagggcatggagtttggctacgtccagtga

SEQ ID NO: 3135 - protein, 237 aa, Myceliophthora thermophilia
MVPLVSVFRQWGNPRVPEWLKQIEAVLDLLEIMEEWSLAARRSREVVWRMYEAARQLVEQQRASASPSIQVLAGGATADGMLMPSPGAAEAAGMHMSPIGLEPVDGLGLMGLLDQGGLWGDLDGMYWTQPGGPSPPPAPLTPQQQQHQQQQQQQQQQPPHISLGSPVDESACMAAAAAAAAEFAAYHSPVVTTAGGGVASPHDTNGMVHAVDYSGLMGHPHQPPHPHQQGMEFGYVQ

SEQ ID NO: 3136 - DNA, 2004 bp, Myceliophthora thermophilia
atgatggcaacacggctttctcgcgccctccccagggccgcagtagcttcccgctcggcgggcatgttccgcaggaccccggcgttcgctaggttcgagtccacggatgagaaggttaagggtgccgttatcggtatcgatcttggcacaaccaactcggccgtcgctgtcatggaaggcaaggccccgaggatcattgagaacgccgagggtgctcgcacaacaccttcagtcgtcgccttcgccgaggatggcgagcgcctcgtcggtgtcgctgccaagcgccaggccgttgtgaaccccgagaacactctctttgccactaagcggttaattggccgcaagttcaccgatgccgaggtgcagcgtgacatcaaggaagttccatacaagatcattcagcacaccaacggcgatgcctgggttgaggctcgcggccagaagtactcgccttctcagattggtggtttcatcctccagaagatgaaggagaccgccgagtcctacctcagcaagccggtcaagaacgccgttgtcactgttcctgcctacttcaacgacagccaaaggcaggccaccaaggatgccggtcagattgccggcctgaacgtcctccgtgtcgtcaacgagcccaccgctgccgcgctcgcctacggtctggagaaggaagctgaccgcgtcgtcgccgtctacgatctcggtggtggtaccttcgatatctcgatcctcgagattcagaacggcgtctttgaggtcaagtcgaccaacggtgacacccaccttggtggtgaggactttgacattcagcttgtccgccacttcgtgcagcagttcaagaaggagtccggcattgatctctccaacgaccgcatggccattcagcgtattcgtgaggctgccgagaaggccaagattgagctgtcgtcgtcgctccagaccgacatcaaccttcccttcatcaccgccgatgcttcgggccccaagcacatcaaccagaagctcactcgcgctcagctcgagtccatggttgagcctctcatcagccgcactgtcgagcctgttcgcaaggccctgaaggatgccaaccttcaggctaaggacatccaggaagtcatcctcgttggtggcatgacccgtatgcctaaggtttccgagtctgtcaagagcatcttcggccgtgagcctgccaaggccgtcaacccggatgaggctgtcgccattggtgctgccgttcagggtgctgtcctctccggtgaggtcaaggacctgctgctcctcgatgttactcccctctctctcggtattgagaccctcggcggtgtcttcacccgtctgatcaaccgcaacactaccattcctaccaagaagtcgcaggtcttctcaactgcggccgacttccagacggccgtcgagatcaaggtctatcagggtgagcgtgagcttgtccgggacaacaagctcctcggcaacttccagctcgtcggtatccctcctgcgcaccgtggcgttccccagatcgaggtcaccttcgacattgatgccgattcgatcgttcacgtccacgccaaggacaagtccaccggcaaggaccagtccatcaccattgcttcgggctctggcctgtccgaggccgagatccagaggatggttgaggagtcggagaagtatgctgagcaggacaaggagcgcaaggctgttattgaggctgccaaccgcgccgacagcgtcgtcaacgacaccgagaaggctctgaacgagtttgccgacaagctcgacaagaccgaggctgaccagatccgcgagaagatgactgctcttcgcgagttcgttgccaaggctcagtctggcgaggtcacggccacttctgctgagatcaaggagaagatggacgagctccaggtcgccagcttgaacctctttgacaagctgcacaaggcccgcgccgagtctggcgagcagagccagagcaccgagggcgagaagaaggacgagcccaaggcttaa

SEQ ID NO: 3137 - protein, 667 aa, Myceliophthora thermophilia
MMATRLSRALPRAAVASRSAGMFRRTPAFARFESTDEKVKGAVIGIDLGTTNSAVAVMEGKAPRIIENAEGARTTPSVVAFAEDGERLVGVAAKRQAVVNPENTLFATKRLIGRKFTDAEVQRDIKEVPYKIIQHTNGDAWVEARGQKYSPSQIGGFILQKMKETAESYLSKPVKNAVVTVPAYFNDSQRQATKDAGQIAGLNVLRVVNEPTAAALAYGLEKEADRVVAVYDLGGGTFDISILEIQNGVFEVKSTNGDTHLGGEDFDIQLVRHFVQQFKKESGIDLSNDRMAIQRIREAAEKAKIELSSSLQTDINLPFITADASGPKHINQKLTRAQLESMVEPLISRTVEPVRKALKDANLQAKDIQEVILVGGMTRMPKVSESVKSIFGREPAKAVNPDEAVAIGAAVQGAVLSGEVKDLLLLDVTPLSLGIETLGGVFTRLINRNTTIPTKKSQVFSTAADFQTAVEIKVYQGERELVRDNKLLGNFQLVGIPPAHRGVPQIEVTFDIDADSIVHVHAKDKSTGKDQSITIASGSGLSEAEIQRMVEESEKYAEQDKERKAVIEAANRADSVVNDTEKALNEFADKLDKTEADQIREKMTALREFVAKAQSGEVTATSAEIKEKMDELQVASLNLFDKLHKARAESGEQSQSTEGEKKDEPKA

SEQ ID NO: 3138 - DNA, 5886 bp, Myceliophthora thermophilia
atgccggggccgcaagcagcgaagggggttggggttccgaagtggcccaatcatctccgacacttcggccgctacggccatgaccgcacccccgagcacgcctactccaactcgcccggcgataccgcctcgagcagctccaccattcgggaacgcccctcgtctcggctatcttcccgcctgcgcgccgagcgacgatggaccgtcaccgtcaacgagtcgtttgcccgtgacgaggtcttgttgaacctcgatctgatgggcgtcggcgacgacatcaccccgggcagccttgtcgctatcgacgtggtcaaggccgactcggagaagccgctgcagaacccgcaccacggccgcagagatgggggcgctgcttcctgcgctaccgacaggcgctacatctgcgtcgccaaggacatgcccagggagctgaaggcgcggtacgcgaccgtcgaggtctacgtcgcaaaacacattgccgacgccttcggcatgaagaagggcacccaagtcaccgtgactccgatcgacgccaacaacccggccatcgaggcttcccacgtcgagctctgcttcaaagaccagtatctctcccgggctgacatgtggcgcctggccgtgggagagctcgcccagaggaccgtctacaagggccagatggtcctatttctgggcaccgtcaaggctcaggtgaccgccgtctatgtcgatggccgcaaggcgcagtctgccttctttggccgcgacacgaagcccgtcttccggagcgagtcggcccgctacgtgctctttatccagatggcccgcgagatgtgggactttgacccggatggttctggcgagatcatgttcaacaaggttgtaaacggcttcctccccgcactcttcaagaagtgggccgccctgaaggtgaaacacctcgtcaccatcgttctctttgcccgcgtcgagtacgacacgggcatctccaccgagctcgcgagtgcctctgtccaccatgactactacaccggcgtacagccttcggaggaccgccgcccttacaaagatttctatcgcgttgtcgtcagcgagatgggcagcggagagtggaccaagatcctgcatcagctcaagcgtgagttcaactacttccgcaaggacatcagcacataccatcagaaggcgatgggaccctccgtgccgggggccgagtccggcgatcgggaagtgctggggaacaggatcaaggccgaggcgtcacgcgccattcatgggaatttcctcgaggccatcaacatggcctcctccctcttcgctcatgactatatcgaccgagacctgaccaggaccggcgtctccgtggttgtcatcagccccggtcctggcgtctttgaagtcgagtacgaggccctccgccgcacgaccgaggcgctcgtgggcaacggtatcggcatcgacctgatatgcatacccaaggttcccctgcattccgtaccccttttccgatatcgcaacccacatccgccggcgcatgcccagcgcaaggccaaggtcgacctcagccaagggagcacgcccaagcagggaacacttacgttcgggagctacggcagccttgccggctcctactcgccaagcaagaagatggatggctcgcgccatggcgaaccatccggccctccttcctcccaggacgagtgggtgtctgccataccgcaatggcttcacgtctcttactggaccggggcctctgaagaggagctgtcttaccagggcattgctctatccgtctcggacgcggcgcaaagccggtctcgcgacgaattccctatccgctgccgcatgtacgacctgcagatgagaagcgtcatggaaacaaacgagatcgagaccaagccgctgcacacggatccctgcttcccgctcggcgcagtccttgccagccagatccccgaaccgcaatttgaccacgatggcaatgtcattgttcggaacacccgccccccggaaaccctgttcgaccacgtgttcggctttcagaagttcgcccccgatcggcacagcaagcccggcgagaagtcgctatggaagcagttgcaagagtacgacgactgtaaagcgcgccggccgtcgcaccagagtaccagccatcccagacgatcccgagaccatgaggatacccctaggcggcagacaatggacgatgcaagcctgttgggaacctcctttacaaaccgccggtcctcgacggcaactcaccagaccctgcccgaactttcaccttatcaccgccctgcgtctcagacattagatgcccccccgcctggcagccataagccgggcatgaacactagtagttctaagaagttcgagtccatggcgccctcgtcgtccccgaagccgcccaagttcatgcgtcacattagcctcggtaaccggggtttcgggattgccgctcccaaggtggcgacggcagaggtggtcaaggagagcgtgggtgcgtccaagacggtgacgccgtctcgcagttcgcaggacctacggatgactccatccaaagccggtcaacgcccctcgtcctcccgtgggttgaacccaggaacgcccgcttccacaacactttcacagcccggtctttcgcccttctcgtttgccgccggccctcagtttcccacggactcgccgacccggcctatcgtaatcaggaaccgttcactcgagcctgccgcaaacatgctttccggttcactcctcgggacgacgctccggccggagctggagggccaagaccgcgactttcagtattccaacgctatcagggcggaagacgccaagaaactctacaactccaaacttctcgctggggctataccggaattgccagctaccttgtccccgaggaccgctctctcgccctggcttacgctgcttaacccgtccaacccggacacgaacgatgtcgacgtggccacgctatacagccgttggcagcacgtcttcccgaggccccaggaattgagggtcatgaaatggaagagtctgtgctctcccgccgccgtgccgctcacgacagagtacttcccctcgaagacgcagtttgagacggaatacgagcgccagccctacaacgtgtcgcaggacctagacgacgagcttcaggaggagccgaggtcgcgtgatgaactattgcgcgagctgatcggcctccggttctcccaagggtttcagatcgttgttggcccggccgtcgcgagggcttttggtcagaagcagatcaaaatcgccgacatcttctcgcgggaccacgtgatggaggacggcatgagcatcttcatgactgtcggcaacaccatccaccagctttcgtgcgtcaatggaaccgaggtcgaggtgaacatttttgttcggaaaccgaccgagcccctctcgccgtcctaccccgcgcccccgcgatacaagccggcggtccggaccctcctggatagcgactacacgacgagcgagctcgaccttgtcccacagagagtggagaggaactggaactacatcgacgcgttcgtcgcaggccacaacaacgagttgacggagcatctccggttctggcgtgctaggtttgtcctgattcccatgacgggccgacgctcgtctgtgccggggattgagaccggcgacagcgaggaggagattcggatcgaaggcatcaggaagctcgctcagatgtggcagaggcaccgctacatccctcccggcgagcggcggctccagggcgcaggcgcccgcgcgaagaaagacatgaacccgttagatatcatctacaagaccgaagatgcctccgtggtcattgcggccgagctcgagacgctgcccctcctggagggcccggaccggaaaggccagctggtgaggagccgccagcagttttccaagaagaacctgaacctggcggcgctcgccgaggcaatccaacaaccggtggagaacggcggagtcaggatgcagaaccgtaggtggcacttccggctgcactacaactgcttcatcggttcggacatgaccagctggcttttggataattttgaagatctcgaagaccgcgaagaggccgaggctctgggcaggcgcctcatggtttcggacgacaaggacgggaagaaagaggggggcttgtttgtgcacgtcgaaagaaggcacccattccgggacgggcagtacttctatcagattagcagcgagtatgcgaagccacacccgcccagctggttcaacaccaagcggggccagggaccggtcccgtcgacgccgacgactgagcagccaccgcgggacggacgaccaggcttctcccggccgatatcgatcggtgaggaagactcgccaacctcggggtcgacgacaccgacggccccgcatgcaccgagcgggaataagccaaaggtgatgctgagcagggtcatcaagtacgatgtggaccacaggaagcggtcgtaccggcccgagatcgtggagctgcactacgacaggctgcacaacccggacaattgctatcacatccgcgtcgactggatgaatgtgacggcgaagctggtcgaggatgccatagaaaactgggggcgtgaggctagccagtacgggctgcggctcgtcgaggtgcccatcgccgaggcgtgcgccatcagcgaatacaaccccttccggcgaccttacctgatcaagttggccacgccgccaccggaccagtcacccatcacctactatgacccgacctcatttaccccccaggcacagccgggccggctgttctaccaaaaagccatcctccggaaattcgacttcgtcctcgacatggaggccgcatccaacttccccagcgacgtggaggtgtcgtactcatggggaaagcccgatttcaagtacacgcagtacatccaccgctcagggtcgctactggccgaaatcaccgacgacggtcatttcctgctcctcgccaatagactttatagcagccgcgcgtttgctgctcgtgagagggaaatgcagaaggagctccgcggcgagcatcagcatcagcaccaccaccaccaccagcaacagcagcagcagcagcaggggcctgcaggagtggcaggcacgccgggctcatacacgccatatggcctgccgacgccctcctctcccgtatcgtccccagccctgcggcccaccaccaacactgccgcttcgtcttcccttctctccccgagcatccgtcccgtgctctccggacaagcaggcactactgggaccccaggccagggacagccgcaattcagaaacaacaacagcactggtagcagcagcagcaccgccgccggtactgctacgtcggcaggcacggcggccgggggtgccaccgcgtcggcgacggcaacaggacaagcctggtcgacctggacgacgcaggagccggagtggatcaaggacgagctggaggcgttttgccgcgacgcgcaggcgctcgaggccttctaccgcgacctccggacggcggccccggcgtcgacgaacgcgggcgggccggccgctatgacgcctgcctttgccccggctgctgccgccagtaccaacgtaccccccgaggggagcatacccgccctggggcttccgccgggagtcctggccggtcctccttcgtcctctgctagtgcggcggcggatgcatcttctgctgccgctggtggtgtcggaggagagggaggaactggcggagagggggctgccggaccgagagtggcgagtcctagcccggcctataggtcggccagccagttgctgaggagaggaagcgtgcagtatgagggactcctggccggcttctcgctgaggggaaccagggagggggggggggataaggagaaagatcgatag

SEQ ID NO: 3139 - protein, 1961 aa, Myceliophthora thermophilia
MPGPQAAKGVGVPKWPNHLRHFGRYGHDRTPEHAYSNSPGDTASSSSTIRERPSSRLSSRLRAERRWTVTVNESFARDEVLLNLDLMGVGDDITPGSLVAIDVVKADSEKPLQNPHHGRRDGGAASCATDRRYICVAKDMPRELKARYATVEVYVAKHIADAFGMKKGTQVTVTPIDANNPAIEASHVELCFKDQYLSRADMWRLAVGELAQRTVYKGQMVLFLGTVKAQVTAVYVDGRKAQSAFFGRDTKPVFRSESARYVLFIQMAREMWDFDPDGSGEIMFNKVVNGFLPALFKKWAALKVKHLVTIVLFARVEYDTGISTELASASVHHDYYTGVQPSEDRRPYKDFYRVVVSEMGSGEWTKILHQLKREFNYFRKDISTYHQKAMGPSVPGAESGDREVLGNRIKAEASRAIHGNFLEAINMASSLFAHDYIDRDLTRTGVSVVVISPGPGVFEVEYEALRRTTEALVGNGIGIDLICIPKVPLHSVPLFRYRNPHPPAHAQRKAKVDLSQGSTPKQGTLTFGSYGSLAGSYSPSKKMDGSRHGEPSGPPSSQDEWVSAIPQWLHVSYWTGASEEELSYQGIALSVSDAAQSRSRDEFPIRCRMYDLQMRSVMETNEIETKPLHTDPCFPLGAVLASQIPEPQFDHDGNVIVRNTRPPETLFDHVFGFQKFAPDRHSKPGEKSLWKQLQEYDDCKARRPSHQSTSHPRRSRDHEDTPRRQTMDDASLLGTSFTNRRSSTATHQTLPELSPYHRPASQTLDAPPPGSHKPGMNTSSSKKFESMAPSSSPKPPKFMRHISLGNRGFGIAAPKVATAEVVKESVGASKTVTPSRSSQDLRMTPSKAGQRPSSSRGLNPGTPASTTLSQPGLSPFSFAAGPQFPTDSPTRPIVIRNRSLEPAANMLSGSLLGTTLRPELEGQDRDFQYSNAIRAEDAKKLYNSKLLAGAIPELPATLSPRTALSPWLTLLNPSNPDTNDVDVATLYSRWQHVFPRPQELRVMKWKSLCSPAAVPLTTEYFPSKTQFETEYERQPYNVSQDLDDELQEEPRSRDELLRELIGLRFSQGFQIVVGPAVARAFGQKQIKIADIFSRDHVMEDGMSIFMTVGNTIHQLSCVNGTEVEVNIFVRKPTEPLSPSYPAPPRYKPAVRTLLDSDYTTSELDLVPQRVERNWNYIDAFVAGHNNELTEHLRFWRARFVLIPMTGRRSSVPGIETGDSEEEIRIEGIRKLAQMWQRHRYIPPGERRLQGAGARAKKDMNPLDIIYKTEDASVVIAAELETLPLLEGPDRKGQLVRSRQQFSKKNLNLAALAEAIQQPVENGGVRMQNRRWHFRLHYNCFIGSDMTSWLLDNFEDLEDREEAEALGRRLMVSDDKDGKKEGGLFVHVERRHPFRDGQYFYQISSEYAKPHPPSWFNTKRGQGPVPSTPTTEQPPRDGRPGFSRPISIGEEDSPTSGSTTPTAPHAPSGNKPKVMLSRVIKYDVDHRKRSYRPEIVELHYDRLHNPDNCYHIRVDWMNVTAKLVEDAIENWGREASQYGLRLVEVPIAEACAISEYNPFRRPYLIKLATPPPDQSPITYYDPTSFTPQAQPGRLFYQKAILRKFDFVLDMEAASNFPSDVEVSYSWGKPDFKYTQYIHRSGSLLAEITDDGHFLLLANRLYSSRAFAAREREMQKELRGEHQHQHHHHHQQQQQQQQGPAGVAGTPGSYTPYGLPTPSSPVSSPALRPTTNTAASSSLLSPSIRPVLSGQAGTTGTPGQGQPQFRNNNSTGSSSSTAAGTATSAGTAAGGATASATATGQAWSTWTTQEPEWIKDELEAFCRDAQALEAFYRDLRTAAPASTNAGGPAAMTPAFAPAAAASTNVPPEGSIPALGLPPGVLAGPPSSSASAAADASSAAAGGVGGEGGTGGEGAAGPRVASPSPAYRSASQLLRRGSVQYEGLLAGFSLRGTREGGGDKEKDR

SEQ ID NO: 3140 - DNA, 810 bp, Myceliophthora thermophilia
atggttcccatgatacaagtaccggcaggggacagccgctttgatggtgagggagcacccggtgctgccgagagcgcgcaaagcacaccaccgaccagaagcagctcccgtccccgacgttgcacccggccgctgtcgtcggcggtccttcccagcagtctcagaagctgccacccatgtaagtctggtcccgcaacgcgctttggcatcggggcagagcttgcttgcccggtggtctggatcgtccttatctccgctgctcccgaattgcagggattggagaggcagaggccagggccgagtgcgtcgcctaccctacgctacttagcgtgctggacgtgtagagtacggatatctggatctcggacaagcaggcgaagaaaatcagagtgctgcgcaagatacttcctgtcacgtatcaagtatgcatatgcagcatctagtgtagccgcccctgtggttcgtatcgatgtgcggattaacctccaggacaagcgaaggcgatggggagggatattgccgcagagattgtttgccaccttcagacaagcagcttgcctcggcaaccgtaggtctcagtcgtccgccaggaagccacagacgcttgcaagcgccccgtatagctctctgcctcttgccgacaatctggttgatgggcaccttggtcaaccaatgcagcacaggccggcgtgttccataaagttcagcaactcgactactaactgcggacgccctgtgcctgtcgaggtcgaggtcgaggtctccacacatgtacctacatacatacaatggaacacaccaaataactaa

SEQ ID NO: 3141 - protein, 269 aa, Myceliophthora thermophilia
MVPMIQVPAGDSRFDGEGAPGAAESAQSTPPTRSSSRPRRCTRPLSSAVLPSSLRSCHPCKSGPATRFGIGAELACPVVWIVLISAAPELQGLERQRPGPSASPTLRYLACWTCRVRISGSRTSRRRKSECCARYFLSRIKYAYAASSVAAPVVRIDVRINLQDKRRRWGGILPQRLFATFRQAACLGNRRSQSSARKPQTLASAPYSSLPLADNLVDGHLGQPMQHRPACSIKFSNSTTNCGRPVPVEVEVEVSTHVPTYIQWNTPNN

SEQ ID NO: 3142 - DNA, 3168 bp, Myceliophthora thermophilia
atggccgacgtcgaccagcagcagggcgggcccggcacctcgcgacgcaagaaacacaccggcaaatcgaaggcacggcccgcaaatgattggccaaggaccgacgagccacgctcccgtgcgtcgcctcgctggaaacgcccgggagatatagacaaggaccttgtcgagtcgtcgtcgtctgacgatgccgacgatgccaaagcttcgtccacctcgcacaggaagcaacgacggcgaccccgtcctcagatcccggcctccacgagctcggacacgtcctcttcggacaccaccgccccggccaagaccccgcagcgttcaatgcggcgacgcctgaagagcacgcgggtgcccaacgcggctgtgccgccccccgacacggcgcccgcccatcggcgcccaacctgcgtcgtcgaggaggacgacgccgacgacactgacgacgccgcacccgcacattcgggtccctcgcgccccgccagtcgccaaaccatagctcgccgcgagtcgagtccccgatccgcccatcgctaccggtcgacccccgagtctcgccgctccccgaggacctccgtctctgactcggaagacgacaccggcgccacctcggactcgaactcggactcggaacaggtcatcctcgcttctgggaaaccccccccgccggccccgatggcccctcccattccctctgctccttcggccgccgccgccgcccgcaactccctgcaggagcgactgagccgccgcccggagatggtctacgaagagaccgagggtgacggcacgtcgaggtacgccccgtcggtcgccaggcatcgctcgctatcccgccctgcctccagcaggcgtgactcctaccgccggcccagggacattaccgtatccggaccccctagccttgacgggacgcgccggtctcggtcgagatcaaagagtgccaggccttcgagaaggcactacgaatccgacgtctatatatcttcgcggcctgcttcgtccttcaagcggcaccatgctgcctcctcctacagcctggcctcctcagccaggcggtccagcctctttggcgatttcgccgcatccacacctcgcactcctcaaccggaaaagccagcggaaggggacgacacggttcctcggagcaagacggtcaagctaaaatgctgccaccgcatgtgccactcctgtctgcgcaaagccttcaagcgatcgctcaccgacccgcagcaatacatgccaccgcgctgctgcacctccgacaatattcccccgcggtacgttgatatgctgtttgactcgggcttcaagaaagactggaacgagaagtacaaggagcacaccagcgcaaggggcttcccttgtccctcgcggaggtgcggtgagatgatgaagcccgagaatatgcgtagcgagggcggccggtggcagggcaggtgtacccgctgcaggaccaaaatctgcggatcttgcaacggtcggtggcaccccgagcccaactgcacaggagccaatgattccgccttgttcgcagaacagccgaccagggaggcttggcaacgctgctaccgctgcaaagccgtggtggaggtcaagggcactcgcaaccacgcgatctgccgttgtggtgcagagctttgcctaggatgcggcgggaagtggaagacttgtgactgcccgtggctcaaggacgacttcgaagacatggacacggtgaattcgcggcctaaccctttcgcctctcggccgccctcacctcgggattttcgctcggattttgccgctccccttgctgctactgctcggccgcgcccgtcgagttacgaggaagacgcgcatatacgccgtttgcatgagtttcgcgaggaccattccgcgcggaggatgcactcttttgacgagaccggccaccacagcgactttgaccggcggcgagacgagtacaactttgatgatctcaccccccgtcgagatcgccgccggcgcgtggaggcgcgagactacgccgcctcttttgtggatgaagactaccaccgccgagcagcaaccgtcgtcgccccgttacccccgcagccccatgtgccgccggcgcccccgccgccccgctccgcattcgagccgccttcacgcccggctttcgatcgatcgacgcccgatttcgactacggctccgcgatacaccggagccgagcgatgcgctatgagtcgccggagagattcgacgactacatgacggacagctacccgccggagcgacggcgccctcgctctccggatctctggccggggcaggcgctcccccaggaacggcggccccggtctcgtgataggcggcatactttcccgtcggaatcgcggcctacgtcgccggatgtgtggcaactgcccacccggtatccgtcgcctgaaaggccgatgccggctccagaagagagacggcgcgctccctcgcctgagaggcgccgggcatcctcgctcgagaggcgtttagccggcagattcaagaaggaacccagacaaagccccgctgctccggtcggtcccggggcgctcagcccggccggtgctctgggtcccttgagtccgtctcgcgccacggcaccgccatcccgagccgccacccacatcggaacaaccatgcctatggcaccggcccctccgccgccggccctccacggtgcggccccgccgccggtagctcccctccgaagacaccacaccatggacgaagacgtctacagccccggcgctggcatgggtcccccccttccggattggttcggcccgccattgcaccacggacatcctcacgcgcacctgcactcgcatcctccgccccccggaatgggaccaggtatgcctcccatgatgccgcagcagcagccacaccaccccagcgtgcacgaggtggtggctgcggacatgaacgctgctgctgctgctgccgccgccgccgccgccgccaacgggtcgccgcgtgcaccgcacgtcagaaggcgcccacccactcacgcccatcgtgagcatagcaagtacgacgtcccgaggtcatcagtgctggcgggactggccggattcggccggggcgcgagccgcgtctcggagtgggtgaactatgtggagccggggttgcctgacgatagcttcggtgcagtggggagttga

SEQ ID NO: 3143 - protein, 1055 aa, Myceliophthora thermophilia
MADVDQQQGGPGTSRRKKHTGKSKARPANDWPRTDEPRSRASPRWKRPGDIDKDLVESSSSDDADDAKASSTSHRKQRRRPRPQIPASTSSDTSSSDTTAPAKTPQRSMRRRLKSTRVPNAAVPPPDTAPAHRRPTCVVEEDDADDTDDAAPAHSGPSRPASRQTIARRESSPRSAHRYRSTPESRRSPRTSVSDSEDDTGATSDSNSDSEQVILASGKPPPPAPMAPPIPSAPSAAAAARNSLQERLSRRPEMVYEETEGDGTSRYAPSVARHRSLSRPASSRRDSYRRPRDITVSGPPSLDGTRRSRSRSKSARPSRRHYESDVYISSRPASSFKRHHAASSYSLASSARRSSLFGDFAASTPRTPQPEKPAEGDDTVPRSKTVKLKCCHRMCHSCLRKAFKRSLTDPQQYMPPRCCTSDNIPPRYVDMLFDSGFKKDWNEKYKEHTSARGFPCPSRRCGEMMKPENMRSEGGRWQGRCTRCRTKICGSCNGRWHPEPNCTGANDSALFAEQPTREAWQRCYRCKAVVEVKGTRNHAICRCGAELCLGCGGKWKTCDCPWLKDDFEDMDTVNSRPNPFASRPPSPRDFRSDFAAPLAATARPRPSSYEEDAHIRRLHEFREDHSARRMHSFDETGHHSDFDRRRDEYNFDDLTPRRDRRRRVEARDYAASFVDEDYHRRAATVVAPLPPQPHVPPAPPPPRSAFEPPSRPAFDRSTPDFDYGSAIHRSRAMRYESPERFDDYMTDSYPPERRRPRSPDLWPGQALPQERRPRSRDRRHTFPSESRPTSPDVWQLPTRYPSPERPMPAPEERRRAPSPERRRASSLERRLAGRFKKEPRQSPAAPVGPGALSPAGALGPLSPSRATAPPSRAATHIGTTMPMAPAPPPPALHGAAPPPVAPLRRHHTMDEDVYSPGAGMGPPLPDWFGPPLHHGHPHAHLHSHPPPPGMGPGMPPMMPQQQPHHPSVHEVVAADMNAAAAAAAAAAAANGSPRAPHVRRRPPTHAHREHSKYDVPRSSVLAGLAGFGRGASRVSEWVNYVEPGLPDDSFGAVGS

SEQ ID NO: 3144 - DNA, 1014 bp, Myceliophthora thermophilia
atggcgtcgtccgtaagcagcagtacaggctccgacagccccggcagcatgacaacaacgacgatgacgacgacgacggccgccggcaccaagccgcagggcgtgacggtcgtggcgacgctcaccaagcgctcgctgatcccggcccgctggaaggaaggctcggtgcgcgtcgtcggcatggccgagtgcaccgaggccgccctgaccctggcccacgcctttgcgaccgacgactacgcccgctacctcgtcgacgacgacggcggcggcggcggcggcgacgcagccactgcttctccttcctctccttctccctcttcctcttcctcttcttcttttaccgccagcagcagcgagaagagcggctggagaaggagtggcggcggcggcggcagcgacctgactgccgaggagagcaagtggaggctgcatgtcgacttcctggtgtacacggtggccgcgcactgcatcagcgggctggtcacggccgtgggccccgagtgtgatagcgtggcgctctgggtgccgcccggaaaacacctcgacggatggtggacgcagctccgcagcggcatgtggcggctctacttccagttctcgcacgaggccaggaagcgctacttcgacgagatcttgccgttgctgcacgacacaaaggcccaggtcctcggcgaccgcaacggcgaggagtggtacctgagctatctcggcaccaagcccagctcgcagggtcgagggtacgctgcgaagcttctgaaggatgtgatggcgcgggccgacgccgaaaaccgacccatatatctggaatccagctcgctggccaacaatgcctactatgagaagtttgacttcgaggtcaaacgggacatctttcttgagcgcgggcccgtcccggttcgcttgtccatcatggttcgtgagccccgcgtgcccggttgcaaggtcgcttacgccagtccgaacccgagtgcgagaaagaggttccccggcgctgtgaagaagccgatgtga

SEQ ID NO: 3145 - protein, 337 aa, Myceliophthora thermophilia
MASSVSSSTGSDSPGSMTTTTMTTTTAAGTKPQGVTVVATLTKRSLIPARWKEGSVRVVGMAECTEAALTLAHAFATDDYARYLVDDDGGGGGGDAATASPSSPSPSSSSSSSFTASSSEKSGWRRSGGGGGSDLTAEESKWRLHVDFLVYTVAAHCISGLVTAVGPECDSVALWVPPGKHLDGWWTQLRSGMWRLYFQFSHEARKRYFDEILPLLHDTKAQVLGDRNGEEWYLSYLGTKPSSQGRGYAAKLLKDVMARADAENRPIYLESSSLANNAYYEKFDFEVKRDIFLERGPVPVRLSIMVREPRVPGCKVAYASPNPSARKRFPGAVKKPM

SEQ ID NO: 3146 - DNA, 870 bp, Myceliophthora thermophilia
atggccagtaagacgtccgcagtggcaggagatgacccaattgaggtgctctttgccctgcatcataagttcaacctcgtggatttcgccggaccccttcagatcctgacttctgccctgaacgatgctgaggattctggttctaaggcctttgaggtcaccattgcaagcggcgagacgaatgtgctctccgagcagggcgtcataatcaactcccagtgcacctggaaggaggcctacgagcgtctcaacgactttgacgtcgtcatcgttgtcggtggcaacactcaagagatcttggacaagaaggaggagcctctcaacctcatctcggcatatgcggagctgcagaagaatgacccgagccgcgagcgcacgttgctgtccgtgtgcacgggctctctgttcctggcgcaacagggcatcctctccggcctctctgccaccacccacccagactacatcactaagattgaaaatatgtgcagccagaacgtcgtccggggcttgggtgaccacaccgacatcatagaagatgctcgctacgtggtaaacaatctgcgtttcgacctcggcgacgaggacgagaacccctacatccggcgcaagtcggacgctagccgtccaactaacgcccggaaggggtcgatgtccttcaaggccgcctctagaagagagtcggttgcccgacgcgccgcaatgcgtctcggtggtctccgtgtcatcacgagtggcggagtagcggcaggcatggatgcggctctgtacctcgttagcatcttggtgtcggcggagtccgccaacgaggtcgcccgcgacatgcagttgacttggactaaaggcgttgtggttgatgggcttgatgtgtaa

SEQ ID NO: 3147 - protein, 289 aa, Myceliophthora thermophilia
MASKTSAVAGDDPIEVLFALHHKFNLVDFAGPLQILTSALNDAEDSGSKAFEVTIASGETNVLSEQGVIINSQCTWKEAYERLNDFDVVIVVGGNTQEILDKKEEPLNLISAYAELQKNDPSRERTLLSVCTGSLFLAQQGILSGLSATTHPDYITKIENMCSQNVVRGLGDHTDIIEDARYVVNNLRFDLGDEDENPYIRRKSDASRPTNARKGSMSFKAASRRESVARRAAMRLGGLRVITSGGVAAGMDAALYLVSILVSAESANEVARDMQLTWTKGVVVDGLDV

SEQ ID NO: 3148 - DNA, 1821 bp, Myceliophthora thermophilia
atgaaccgaccaggtatggtggtgctgcgcccgtccttttttttttttcccgactcgaccttcccggtccctcttgtgccccgctgcttggcccgttcccggccttcacatatcctgcatgagaccctctgccgcatcgagcgggcattcgggggcgctgaggatgggatgactgtttggcctggaagggagtcggggttctgggtacagagatgggtcggattctggttcaaggcgcggttgggcgagccggatgtcgcagagtcctctcgaacagcgctcccgtcaccgagcatccaccccactgctgctatcgtcaccattgtcgagtaccccggaggagaatatgctgacgcgcacgcgatgatagggggtgtaccacaggcgcttcgcggcatgcccaatgggttcgcaggccagcaacagcaacaacagcaatccggccgggccgtctcgaacaggttaccgaacggaaagatagggccggtcgggaacgcggcaggatggggtttcggcggtggcatgcctatgggggggagcgcaagtgtgcccccgggcgcggcgagaccactaggaggaaacgttagcttcgcgcagagcctgacggggtcacagccggcaacgccacttgacctagcagagtttccaacgttatccaattcaaaccagctcaactcggcaaaccagtcgtccatgtggtctgcgcaaggtccccggaatcttggtgcgggcgtccatcggggaggggggactccaatctcgtcgcagcagaatcagcaagacgatatgttcgcctcgcgtttggcttcggctcagagctcatatagatacgggaaccaagggaccgggtcccaagcagctcaagggcagtctggtgtagccgacgattttccgccgctgaaccggagcgcaaacggagagatgggcgggcaggagcgaggaggtaacctgatgtcaagcttggggtttggctcccagggctcggcttccgggtccgcgatgcacgcgaatcgggcaggaaacggtctgctgaacgcgctgtctgcgacgtcgagggccgcggacgttcgctcaccgtccgcgatagcgcgaccacaggactcacgtagtccggccgaggatgagtcgcgccagaaggggactggatatcgcgaggattcggcaggcgcggtagccgggaaaaaccctcacggcgcgatcggcaatgaccctccgacaggaaagggcaaagaggaggagaagggttctgccagccaggtgcaagatcctctagaggggatggcacccatcgataaatggggcctgaaggggctccggacgttgatgaataatttccccgattacaatgcgctgacgtgcgggctcgacccggcgtcgctgggggtggacatgcgctcgacagacctgttgtcagcgaaggtctactcgctctacgaagatgctccgccgcggtcgccggtgcccaagttccgtcttcctgactgctaccaagtgaagaacgtccagccgatcgaggccaagatctcgagcttcaacgaggagacgttgatgtggatcttctacagctgcccgcgggatattaagcagcaaatggccgcgatcgagctcaataaccgcaactggcggtggcacaagaagatgcagatgtggctgactaaagacgacgtcatggtgccccagtccttgggtcctgctcacgagcgcgggtattacatcgtctgggacacggccaactggcgcaaggagaggcgagaactggtgttgcactatgccgatcttgatactacgcctaccgcccagctgcagagcataggagcttga

SEQ ID NO: 3149 - protein, 606 aa, Myceliophthora thermophilia
MNRPGMVVLRPSFFFFPDSTFPVPLVPRCLARSRPSHILHETLCRIERAFGGAEDGMTVWPGRESGFWVQRWVGFWFKARLGEPDVAESSRTALPSPSIHPTAAIVTIVEYPGGEYADAHAMIGGVPQALRGMPNGFAGQQQQQQQSGRAVSNRLPNGKIGPVGNAAGWGFGGGMPMGGSASVPPGAARPLGGNVSFAQSLTGSQPATPLDLAEFPTLSNSNQLNSANQSSMWSAQGPRNLGAGVHRGGGTPISSQQNQQDDMFASRLASAQSSYRYGNQGTGSQAAQGQSGVADDFPPLNRSANGEMGGQERGGNLMSSLGFGSQGSASGSAMHANRAGNGLLNALSATSRAADVRSPSAIARPQDSRSPAEDESRQKGTGYREDSAGAVAGKNPHGAIGNDPPTGKGKEEEKGSASQVQDPLEGMAPIDKWGLKGLRTLMNNFPDYNALTCGLDPASLGVDMRSTDLLSAKVYSLYEDAPPRSPVPKFRLPDCYQVKNVQPIEAKISSFNEETLMWIFYSCPRDIKQQMAAIELNNRNWRWHKKMQMWLTKDDVMVPQSLGPAHERGYYIVWDTANWRKERRELVLHYADLDTTPTAQLQSIGA

SEQ ID NO: 3150 - DNA, 861 bp, Myceliophthora thermophilia
atgcgcagcacctcgtcctcctccacagcgcaacccggcgcgcagcaacaatcacaatcacagggccaccaaaagaagcccatctactttgggccctttgaagtgacaaaccaagtcttcctcacaaccccccactccttcgccctcgtcaacctcaagcccctcctgccgggccatgtcctcgtctgcccgctggtcccgcaccgccgcctgaccgacctctccccggtcgagctgaccgacctcttcacggccgtccagcgcgtccagcgcatgctggcacgccactacttcctgggccccgcctcatcctcctccccttcctccgcagcagcatcgctaccaccaccaccgccaccatcaccaccatcgtcatcatcatcatcatcatcgacaccatcagcagcatcacaaccatcaccgcccggccaccaccagcagcagcagcagcagcagcatgacgggcaggccccgctccgcgagggcggccgcgggggcgaggaggagcgggggtccttcaacattgcgctgcaggacgggcccgaggccgggcagacggtggcgcacgtccacgtgcacgtgatcccgcgcatccgcggggcgacggccaagccggcgtcgaccccgtcggacgccatctacgagcagatggcggccgaggagggcaacgtcggcggggcgctgtgggaccgggaccgggagcggcagcgcgagagcggtgatggtggcaggccggtgccggggggcgggttcccccgtatcgaagacgccgcgcgggtggcgaggggaatggaggagatggaggaggaagccgggatctatcggcgggtcttggagcagatggaggcggagggcctgtga

SEQ ID NO: 3151 - protein, 286 aa, Myceliophthora thermophilia
MRSTSSSSTAQPGAQQQSQSQGHQKKPIYFGPFEVTNQVFLTTPHSFALVNLKPLLPGHVLVCPLVPHRRLTDLSPVELTDLFTAVQRVQRMLARHYFLGPASSSSPSSAAASLPPPPPPSPPSSSSSSSSTPSAASQPSPPGHHQQQQQQQHDGQAPLREGGRGGEEERGSFNIALQDGPEAGQTVAHVHVHVIPRIRGATAKPASTPSDAIYEQMAAEEGNVGGALWDRDRERQRESGDGGRPVPGGGFPRIEDAARVARGMEEMEEEAGIYRRVLEQMEAEGL

SEQ ID NO: 3152 - DNA, 225 bp, Myceliophthora thermophilia
atggaggacgttatcgaagtagcggccacaagctacgaagacaggggtagcgacacagacaatctcggacatgacgacaatggcgaagacgaacaagcaccgtactccgaactggtcactgtggacctagagacaggtctcgccgaatgggacatggcaggagaatatacaccgccagtttcgattctcccggccttgagacagtggggtctcacggtcacgtag

SEQ ID NO: 3153 - protein, 74 aa, Myceliophthora thermophilia
MEDVIEVAATSYEDRGSDTDNLGHDDNGEDEQAPYSELVTVDLETGLAEWDMAGEYTPPVSILPALRQWGLTVT

SEQ ID NO: 3154 - DNA, 753 bp, Myceliophthora thermophilia
atgtcaaccacaaccgacccgtcctcccaggcgccggccttcgtgccgctcgaggccaacccggagctcatgacgaacctgctgcacacgctggggctgtcgcggtcgctggcggtgcacgacgtgtactcgctgacggagccgtcgctgctggccttcatcccgcggccggcgcacgcgctgctgctcgtgttccccgtctcggccgcgtacgagtcgcaccggctggccgaggacgcgacggtggcccccggcggcggcgggtacgacgggcgcggcgaggacgagccggtggtctggttccggcagacgatccgcaacgcgtgcgggctcatcggcctgctgcacgcggccgccaacggcgaggcgcgccgggccgtcgagcccggcacgccgctcgaccgcctcctcgccgccgccgtcccgctcgggccggacgagcgcgcgcgcctgctcgagcgcgaccccgccctcgcggccgcccaccagagcgccgccgagcagggcgacaccaccgcccccgccgccaccgacgacgtcgacctgcactacgtctgcttcgtcaagggccgcgacggcgccctctgggagctcgacggccggcgcaagggccccctgaggaggggcgacctcgacagctccgaggacgtgctcagcgagaaggcccttgccctcggcccgctcaagttcctcgagagggaggccgccgacctgaggtttagctgcgtcgcgctggcgaggagcttggattaa

SEQ ID NO: 3155 - protein, 250 aa, Myceliophthora thermophilia
MSTTTDPSSQAPAFVPLEANPELMTNLLHTLGLSRSLAVHDVYSLTEPSLLAFIPRPAHALLLVFPVSAAYESHRLAEDATVAPGGGGYDGRGEDEPVVWFRQTIRNACGLIGLLHAAANGEARRAVEPGTPLDRLLAAAVPLGPDERARLLERDPALAAAHQSAAEQGDTTAPAATDDVDLHYVCFVKGRDGALWELDGRRKGPLRRGDLDSSEDVLSEKALALGPLKFLEREAADLRFSCVALARSLD

SEQ ID NO: 3156 - DNA, 819 bp, Myceliophthora thermophilia
atggaaagcccacacgagcatcagcagaacctgcttctgtcacgcatcatcaccaacgtggaaaagcttaatgaatccattgttgtgatgaacaaggcccttcaggagatcaacattcagaatatgaacattgagctggtggcccagatgttcaaaaactatcagtccaacgtgctatttcacctcgaagacgtcgagggaaccgaggaaatctgtctggccaagctccagaagcacatcgaccaactgggcgatggtgtcttcgcggaggagttgttgggttcacttcgcaatacgtccgcggcggcaccctcctggacaacaacgccaccacgaggcccttccagctccggtggtttccgccaactcatctcggtagtcgacgacctcaacttccggtacggggtgacgcatcaagacatcgcggcacggaacctggtgatcaacgagaaggataacctccgcattttcgacttcaactatgccgtcatgatcgggaaggactacacaccacaccacaacgacatcaagggcgtcatcttcaccctctacgagatcatcacgctggacgagcatttccgcgaagtcccgcatgaggagcaggacgtggaaccagtgttgaagatgagttgggagaagcaccccgacgtcaccgggacggagacgcgacgtatcccgtttgtgctgcggaaagagatggtggccttggggcaggagtattggaactgggaaagacccgcgcgagctacaacttggccgaagctcttgccaaacagaaaacaggccaaggcgataccaaaccgggggattcttgaatga

SEQ ID NO: 3157 - protein, 272 aa, Myceliophthora thermophilia
MESPHEHQQNLLLSRIITNVEKLNESIVVMNKALQEINIQNMNIELVAQMFKNYQSNVLFHLEDVEGTEEICLAKLQKHIDQLGDGVFAEELLGSLRNTSAAAPSWTTTPPRGPSSSGGFRQLISVVDDLNFRYGVTHQDIAARNLVINEKDNLRIFDFNYAVMIGKDYTPHHNDIKGVIFTLYEIITLDEHFREVPHEEQDVEPVLKMSWEKHPDVTGTETRRIPFVLRKEMVALGQEYWNWERPARATTWPKLLPNRKQAKAIPNRGILE

SEQ ID NO: 3158 - DNA, 3450 bp, Myceliophthora thermophilia
atggcgactcatgatagctccggcggcgaaggtcctctcgaggaccgactgcgcaacttgatcctgaaccatgccatggagttatcggcacaccaggcgcgggatgcggcatctcatttgcagttccagcagcctatcgcccagcctatcgcccagcctatcgcccagccgatctctcagtcgggccagaatggagttccgggtccggcctcgccaggtaatccgggcggttcctcctcatcgaaacctgcccggaagcgaccaaaccaagcacagcgtcgccaaatgtctgcccagctctccatcccgatcgacacgcggccccagttcccatcgccgcagaggtcatatgcgagccctccaggttaccaggatcagcatcaacaccacggcaaggggggctcccgcaggaatcaaccaccacacccggctgctttccgcccacccagccgcgacgatggggtaccgagcgcgcctttgaccggcccgccgtttcctccccggtcgcggcaccagccttcgctgtcgtaccatgggcccatgccgaccccgaaccagtacggctggccgccgcctcccccgcttccccgggacccaaggatgccgttctatcatcagatgccaggcatgccgcccatgccgcccatgccgcccatgccgcccgtgcccttcgatgccccggcaccgacccatcgaccgcagcacagttccgacctcaacggctctgaagggccgttgctccctagcccggaggaactgatggctcagtcggaaatgcttcagcgcctctgcgacacaatagttgcagatgccgagattgagactgccgagatcatagagaaggaaaactttcgccagaaaattgagaaagtcgcgcgatctgtcattgccgaacacgagaggaaacagaacggtttcgagaacttcccggaagagagtgtccagctcaagtgcttcggcagccttgcgtccggctttgctaccaaggcttctgatatggaccttggtcttttgtctccattgtcacgcgttcagcccgacgagcccggttccctgattcccaggctcgtcgaaaaagcattccttgacatgggcctcggcgccaggctgctcgcacaggcacgcgtccccatcatcaaggtctgcgaaaagccctccgaggagcttcgccaggccctcctggctgagcgggcgaagtgggaacagggtggtggtgggaacgaccaggatgacgaagctcatgacggcgcagacttggatgcgaccgaggaccgaatccacgaaacggaggctcagctacgggaagaggtacccgggttggacagtgctgagcgagatgctgccgacgctcggaccgtctccgacgaccgccccaacgaacccgacgcgcagccccaagaaaagaccatggatcccgaggagaggctgcgccagctgaaacagggcgcgacttccggcttatcttcctactatgcctctgcaaaacgcttgcttcgaaagctcggcggccgcgatatcacccgatccaacagaaatgagtttggggaagaagatgtcaagctcctcaaccgagtttgcctcgcgttcgttgacggcttggcggacaagactctgcgcaaccggttactcagataccgttccctaaatcgttatgatctctctcagggcagtcatcctcgcaccctgctgagcgtccttaaccagatcgagggcgagatgatcgcgtcgctatgggactcccgccctttccaggagaaggacgagcaccgcgaagccgctgcggagaacatcatcaaggcttgggaggcactccaggacaggcccgactttggtcgagatcctctcgcttatcagaaggagctgcacctggcggtggaacagctgaagaaaatcgccacgatccaggtcttgcttctctctcagggctcgaacgagtctccaggcagctactgcagcagggcaatgaggttgctccatgagcttggcggaaacgactcgcgcgaccgggccgagacggtcctgccaaccctgatcgagcattacgtcggaggcatctcggatcaagccatccgggagcaagtccgggacttccaacagtcccaccgcatcagccgcctgcagaccatcggccgtagacacaagagtctacagctggcccacgattacgaagtttgtctcgcgaagggcgtgtatgagaacgaggccgcagccacggttcggcagtatgttgacctcctgcgggctccgctacccaagtcaggtgcaggtcattcccacggcatgatcccgctccctccacactcgccgcttctctcgcgcatccgccagctcggcgatccgtccaaggcagcaccgaaccgaccgcgggaccgctacagcagcgccctcgagtttcccaagaccggcgtcggcgtgcaatgcgacatcaacttttccgcccatctcgcggtccaaaacactctccttctgcgatgctactcccactgtgacccccgcgtacggccgctcatcctcttcgtcaagcattgggccaaagtccgccgcatcaactcgtcctaccgtggcacgctcagcagctacggctacacgctcatgatgctgcactacctcgtcaacatcgcccagccgtttgtctgtccgaacctacagcagctcgcccggccgccggatccgaacctcagcccccagcagattgaggagacggtctgctgcaaggggcgaaacatacagttttggcgcgacgaggcagagatcatccgcctcgcccgcagcaacgcgctgacgcagaaccgcgagtctgtcggcgagctcctgcgcggcttcttcgagtattacgccaaaggtggctcggccatgaccctgttgccctgccggagcttcgactggggccgcgacgtgatcagtcttcgaacgcacggcggcctgctgacgaagcaggccaaggggtggacaggtgccaagacagtgctcgagggccagccggcggcggtccatctcctcaaccgggccgccaccagccgccgcaccccggcggagcaatcgccgcagggcggggccgggggcgggggcggaggcgggagcgggagcgcgcagtcgagcaaacaagcgggcgcgcagctcaaggaggtccgtcaccgctacctcttcgccatcgaggaccccttcgagctggaccacaacgtcgcgcgcaccgtcacgcacgacggcatcgtcaacatccgcgacgagttccggcgcgcctggcgcatcatccgcaacgccgggcgcagtgcccagggccagggcaggcaccagggcggctggaagcaggagagcctgctggaggacgtggccgacgccgagacggaaagggagagggaggcgttcagcaaactgctcgaggagctgcacggggttcctggcggcgcgccagatggaggcgagcggggagcgacggtgggcgaggagtag

SEQ ID NO: 3159 - protein, 1149 aa, Myceliophthora thermophilia
MATHDSSGGEGPLEDRLRNLILNHAMELSAHQARDAASHLQFQQPIAQPIAQPIAQPISQSGQNGVPGPASPGNPGGSSSSKPARKRPNQAQRRQMSAQLSIPIDTRPQFPSPQRSYASPPGYQDQHQHHGKGGSRRNQPPHPAAFRPPSRDDGVPSAPLTGPPFPPRSRHQPSLSYHGPMPTPNQYGWPPPPPLPRDPRMPFYHQMPGMPPMPPMPPMPPVPFDAPAPTHRPQHSSDLNGSEGPLLPSPEELMAQSEMLQRLCDTIVADAEIETAEIIEKENFRQKIEKVARSVIAEHERKQNGFENFPEESVQLKCFGSLASGFATKASDMDLGLLSPLSRVQPDEPGSLIPRLVEKAFLDMGLGARLLAQARVPIIKVCEKPSEELRQALLAERAKWEQGGGGNDQDDEAHDGADLDATEDRIHETEAQLREEVPGLDSAERDAADARTVSDDRPNEPDAQPQEKTMDPEERLRQLKQGATSGLSSYYASAKRLLRKLGGRDITRSNRNEFGEEDVKLLNRVCLAFVDGLADKTLRNRLLRYRSLNRYDLSQGSHPRTLLSVLNQIEGEMIASLWDSRPFQEKDEHREAAAENIIKAWEALQDRPDFGRDPLAYQKELHLAVEQLKKIATIQVLLLSQGSNESPGSYCSRAMRLLHELGGNDSRDRAETVLPTLIEHYVGGISDQAIREQVRDFQQSHRISRLQTIGRRHKSLQLAHDYEVCLAKGVYENEAAATVRQYVDLLRAPLPKSGAGHSHGMIPLPPHSPLLSRIRQLGDPSKAAPNRPRDRYSSALEFPKTGVGVQCDINFSAHLAVQNTLLLRCYSHCDPRVRPLILFVKHWAKVRRINSSYRGTLSSYGYTLMMLHYLVNIAQPFVCPNLQQLARPPDPNLSPQQIEETVCCKGRNIQFWRDEAEIIRLARSNALTQNRESVGELLRGFFEYYAKGGSAMTLLPCRSFDWGRDVISLRTHGGLLTKQAKGWTGAKTVLEGQPAAVHLLNRAATSRRTPAEQSPQGGAGGGGGGGSGSAQSSKQAGAQLKEVRHRYLFAIEDPFELDHNVARTVTHDGIVNIRDEFRRAWRIIRNAGRSAQGQGRHQGGWKQESLLEDVADAETEREREAFSKLLEELHGVPGGAPDGGERGATVGEE

SEQ ID NO: 3160 - DNA, 2520 bp, Myceliophthora thermophilia
atggccatggccccgcccaggaacgagcgcctcttcgagccaaatgcatccatcgtgctcgtcggctgccggggcgcgggcaagcgcaccctgggcttcctgggcgccctccatctccggcggcgcctcgttaccgaggaccactacttcgagaaggtgacggggctctcgaggggccagtacctcgccaggcacggcagggaccgcttcgcccgccagaccatcgacgtgttcaggcgcatgctggacgccaaccggaccgggtgcatcatcgaatgcggcatgagcagcttcaaccaggaggcccaggacgtcctgcgcgagtactccaagacgcaccccgtcgtctacatccatcgcgaaaaggagcagatcgccagcctgatggacgccgcggatgcccagcagctgctcgaggccgacggaacccacaggagctgctccaactttgaatactacaacctccacgactcggccacccccatcgccgcctcggcttccgtctccggtaccagcacgcccaccaacggccggcagcagtccgggccgtccaagctcctgtgcgtccaggaggactttgcccgcttcctcgacatcatcacgggccgcggcgcagccaaggcgtggctggagagccccttttccgtcgccgccatccccgtcgagttccgcgcctactcatacgccctgcggctgcggctatcgtccctcgtcggcgtggatctcgactgggatgatttcgaggcaagtgcggactgcgtcgagctgatcatcgaccactggccagacgacctcatgaacgtcatcgcacggcaggtcgccctgatcagaaggtacatgggcgtccccatcatctaccacgtcgaggagaacccccgcggcgagcggcggaggccgcccgaggagaagaaccccatggacgccgagctgctcgagctgggcctccggctaggagtggactacatcagcgtcgacctccagcgcgacgaggccctcgtacaccgggttctgcagcgccgcggcaggtcgaaggttatcggcaacttctggcacatggggttaggcgctctcccttggcaggacgaccgacagatcgagaactaccggcgcgcccgggcgctcggctgcgatatcgttcggatggtgcggttctgcgtcaacgacagcccggccgagtacctcgacgacttcaagaagcgggtgcacgagaccttccccgaccccaaaccgcccctggtcgcctacgacttctccgtcctcggcgtgcgcaccccgctccagaccaacatcctcgcccccgtcaagcacctgggcatggagaacgggcgcgaccacctggccaccgtctcgcacgcctcccacgccttcgagatgaactttcgccagttcctgctcgaccccctccagttctacgtcctcggctccaacgtctcctactcgctctccccggccatgcacacggccgcctacgacttcaactcgatgccgcactccttccgggccgtctcgtgcgccaccctcgacagcctcaaccagatctgctccgccgacacctttggcggcgcctgcctgaccgcgcccttcaaggtggccgtcatgccccaactcaaagtcaggtcggcccacgcggacgccatcggcgccgtcaacgtgctcctgcccctgcgcggccgcaccggcgccgtcctggaccacgccaacgcgcgcaaccgcgccggcccggcccgcgggttcttcggcgacaacaccgactggagctccatcctcacctgcctccgcagggccatctcgccccgcaaccacgtccagccgtccaagacgaccgccctggtcgtcggcgccggcggcatggcccgcgcccccatctacgccctctaccagctcggctgccgcaacatcttcgtctacaaccgcaccgtccgccgcgccacggacgtcgccgcccatttcaaccgctgggccgccctccaggctgccgctgccccgccgaccgctcccaccaccgccacgggccccacccagaatgccggcggtgtaggcgtgggtgcgggtggtggtggtgttactggcaggggggtaagcccgaccgggatgatgatggcgatgatgatgaatggcgcggccgccggcaccggcggcggcggggcagcggtgccgagggagatgtgtagggtgctgacgtcgctgtcggagccctggcccgaggggttccagctgcccaccattgtcatctcgtgcgtaccggcgacgagtgtggacggaaacccgccggcggattttgtgatgccgctggactggctccggagtccgaccggtggcgtcgtagtcgagttggcttatgagcccctcgtcacccctctggttgcgcagatgcgggcagtgcgcgacaagatgtgcccgtcgtgggtcgtggtggacgggctggaagtggtcgccgagatggccatcgaggcgtttgagctcatgactggccgcatggcgccgaagcgaatcatgaaggagttagtccgctggtcatag

SEQ ID NO: 3161 - protein, 839 aa, Myceliophthora thermophilia
MAMAPPRNERLFEPNASIVLVGCRGAGKRTLGFLGALHLRRRLVTEDHYFEKVTGLSRGQYLARHGRDRFARQTIDVFRRMLDANRTGCIIECGMSSFNQEAQDVLREYSKTHPVVYIHREKEQIASLMDAADAQQLLEADGTHRSCSNFEYYNLHDSATPIAASASVSGTSTPTNGRQQSGPSKLLCVQEDFARFLDIITGRGAAKAWLESPFSVAAIPVEFRAYSYALRLRLSSLVGVDLDWDDFEASADCVELIIDHWPDDLMNVIARQVALIRRYMGVPIIYHVEENPRGERRRPPEEKNPMDAELLELGLRLGVDYISVDLQRDEALVHRVLQRRGRSKVIGNFWHMGLGALPWQDDRQIENYRRARALGCDIVRMVRFCVNDSPAEYLDDFKKRVHETFPDPKPPLVAYDFSVLGVRTPLQTNILAPVKHLGMENGRDHLATVSHASHAFEMNFRQFLLDPLQFYVLGSNVSYSLSPAMHTAAYDFNSMPHSFRAVSCATLDSLNQICSADTFGGACLTAPFKVAVMPQLKVRSAHADAIGAVNVLLPLRGRTGAVLDHANARNRAGPARGFFGDNTDWSSILTCLRRAISPRNHVQPSKTTALVVGAGGMARAPIYALYQLGCRNIFVYNRTVRRATDVAAHFNRWAALQAAAAPPTAPTTATGPTQNAGGVGVGAGGGGVTGRGVSPTGMMMAMMMNGAAAGTGGGGAAVPREMCRVLTSLSEPWPEGFQLPTIVISCVPATSVDGNPPADFVMPLDWLRSPTGGVVVELAYEPLVTPLVAQMRAVRDKMCPSWVVVDGLEVVAEMAIEAFELMTGRMAPKRIMKELVRWS

SEQ ID NO: 3162 - DNA, 993 bp, Myceliophthora thermophilia
atgaacgaaggcgattatcaaaccgtaccggtcgacaacacgtatcgagaggtcgtcgtctatgccaatagggagttccagcggtacgccttggagaacgggatatacttcgctccggttgacgacgaagagatcgatcgactccaatacatgcatggaatcttcaacatgatgttcgacaacaggctcatattcccgccgattccgcgaccgagaagaatcctggactgtgggtcgggttccggcgcgtgggccatggaggttgctgagcagtatcttgaatgcgaggtcatcggaatcgacatatacccttatccggtaccagaagacattccgcccaacctggaattccaggtcgacgacctcaacagtccgtcgacgttcccgtccaactatttcgatctggtgcatagccggatgatggcgggaggaattcatgcgaacagatggatgaattatctgagcgacatcctgcgggtgctccgtcctggcggatggtgtcagatggtggagatatacttcaacgcgcaatcagacaatgggacgcttacctccaatcatgctctccaagtatggtcacagagttatatgcagagcatccagcccctgaaagatcctcgagcacctttgcggctgcaaaactggatgacgcaagccggttttgtcgaagttgaatcacgggtgttgactctgcccctgaatcttcgcgagaatgccatcggtgcagcaaaccaggccaacgttcatcatctcatgtcctccctttccgtctacccgtttgcgcacaccctgaacatgacggacaccgacatccagttgctcattgctcaggcccgcagtgaagctaatgacccagccttcaaggaagcggcaggcatcaccggcattatgactcccgaagccatcagcactcgacggctgggaagcacagcgactcgcgaaaacgggcgcggcacgggtaggttcatcgatgcctcgggtgaagcatggtaa

SEQ ID NO: 3163 - protein, 330 aa, Myceliophthora thermophilia
MNEGDYQTVPVDNTYREVVVYANREFQRYALENGIYFAPVDDEEIDRLQYMHGIFNMMFDNRLIFPPIPRPRRILDCGSGSGAWAMEVAEQYLECEVIGIDIYPYPVPEDIPPNLEFQVDDLNSPSTFPSNYFDLVHSRMMAGGIHANRWMNYLSDILRVLRPGGWCQMVEIYFNAQSDNGTLTSNHALQVWSQSYMQSIQPLKDPRAPLRLQNWMTQAGFVEVESRVLTLPLNLRENAIGAANQANVHHLMSSLSVYPFAHTLNMTDTDIQLLIAQARSEANDPAFKEAAGITGIMTPEAISTRRLGSTATRENGRGTGRFIDASGEAW

SEQ ID NO: 3164 - DNA, 927 bp, Myceliophthora thermophilia
atggcaactgacccctccactcacctcagcctccgggaggaccatatcgccacagcatcgcccgagaccaccagcaacaaagcgactacggccgacccctcgccttctctctcaccagatccctttgaccaccaaacggatatccaacgtggccgcaaacgccaccgcgccatccgggacatcaaagtcacgaccactgctgccgccgccactactgccgccgccactactgccgccatcactactgccaccaccaccaaacaccgaccgagaccctgcccgggctcgacagattctcgcaccctgcgcggccgtgcccggaaccgctccacctctgtcatctcgacgacgaccgccacaaccacaaccaccacctcaacgccgtcaccagctctcgcccatgccctatccctctcccacccggatgccaaccttgctgccgagcagcatcatcaccgccaccaccaccaccagcaggtcccccattgtcaccatgatcatcatgatgagcaacagcaacagcagcacaccctctcggagggattgatgacctccaacttgggggtagcagtacgtgccgagcggtggcaggacagtccgcagggaaactggcagaggcagaaggagaggaagagggagagggagagggagaggaagacggcgaagaggagggtggtgtggcgaaggcggagccagagtccctcacgatcgaggtctcctcctcctcctccccctcgtcccctgtcttctccggcggacaccggcgaacccgggcccgaacctgggctggcgggcgcctttgttgaggacgggacggcgagcggcgccgtcaacagcagcaagagcagcagcagtggtgggaggaggaggaggagaagacagaggacgacgagtcggagccgggagcaccgggtcctggctacctga

SEQ ID NO: 3165 - protein, 308 aa, Myceliophthora thermophilia
MATDPSTHLSLREDHIATASPETTSNKATTADPSPSLSPDPFDHQTDIQRGRKRHRAIRDIKVTTTAAAATTAAATTAAITTATTTKHRPRPCPGSTDSRTLRGRARNRSTSVISTTTATTTTTTSTPSPALAHALSLSHPDANLAAEQHHHRHHHHQQVPHCHHDHHDEQQQQQHTLSEGLMTSNLGVAVRAERWQDSPQGNWQRQKERKRERERERKTAKRRVVWRRRSQSPSRSRSPPPPPPRPLSSPADTGEPGPEPGLAGAFVEDGTASGAVNSSKSSSSGGRRRRRRQRTTSRSREHRVLAT

SEQ ID NO: 3166 - DNA, 717 bp, Myceliophthora thermophilia
atgggttgcgctaccaacggggtttccccccgcaaagtcttctttttcgacattgacaattgtctctatccgaggagcaccaaggtacacgacctaatggccgatctcatcgacaaatactttgccacgcacctctcactgccctgggaggatgcagtgcggttacacaaggaatactaccagaactacggtctcgccattgagggcctggtacggcaccatcagatcgaccccctagactacaacgccaaggtcgacgacgccctcccgctggacgacgtcatcaaaccccggccagagctcaagaagctgcttggcgacattgaccagagcaaggtcaagctgtggctcttcaccaatgcctacatcaaccacgccaagcgagttgttcgcttactcgaagtcgaggagttcttcgagggggtcacatactgcgactacagctccgtgcccttcacctgcaagccccagcccgccatgtaccagaaggcgatgcgtgaggccggggtggagagatatgaagactgcttctttgtcgatgattcgtaccaaaattgcaaaaaggcgcaggaactcgggtggaccgtcgcccacctcgtcgaggacggtgtcaaaccaccaaagactccagcctgcaaattccagatcaggcatctggacgacctacgcacagtcttcccgcagtgtttcaagggaagcgcctcgaaaggtagctga

SEQ ID NO: 3167 - protein, 238 aa, Myceliophthora thermophilia
MGCATNGVSPRKVFFFDIDNCLYPRSTKVHDLMADLIDKYFATHLSLPWEDAVRLHKEYYQNYGLAIEGLVRHHQIDPLDYNAKVDDALPLDDVIKPRPELKKLLGDIDQSKVKLWLFTNAYINHAKRVVRLLEVEEFFEGVTYCDYSSVPFTCKPQPAMYQKAMREAGVERYEDCFFVDDSYQNCKKAQELGWTVAHLVEDGVKPPKTPACKFQIRHLDDLRTVFPQCFKGSASKGS

SEQ ID NO: 3168 - DNA, 324 bp, Myceliophthora thermophilia
atgccgtgggtgcccaagcaacctatcggtatatggagccgggcagccggccagtcgggcagccgggcacgccggggtattttgaaagcctacctcaacctcaattacttgattagaaccgaagttcaggttaagggtgttaggtgtggctatgggattatggctacctttcgacctctgccagcctccaaggaaagccccaaaagcgttctagcagtaggcccatggcgggccgtcgcttcgcaactcgcggcccccgttgaagctctgtggcggggcaaagttgcccagcccctcctgacgtcaccggcaagtgggtactga

SEQ ID NO: 3169 - protein, 107 aa, Myceliophthora thermophilia
MPWVPKQPIGIWSRAAGQSGSRARRGILKAYLNLNYLIRTEVQVKGVRCGYGIMATFRPLPASKESPKSVLAVGPWRAVASQLAAPVEALWRGKVAQPLLTSPASGY

SEQ ID NO: 3170 - DNA, 345 bp, Myceliophthora thermophilia
atgccctcatcgtcaacaacaacaacaacaacaacatctgagagaacaagagcatcccacccctcgaacaacaccaaatccccagccgatatgtcgtctcagccatcatacaccaccaccaccaccaccaccaccaccgcggccgccgacaaccaggcacggcgcagcgtcgacgccgacgccgcctcggtcgccactacctcgtccctgtccagccgcataactctcctcaaagacaagctccaccacaatcaccaccactcatcaacctcagtttccagttcgagagaggagcaggagaggaaagagagcgtgctgcggaatcagatccggatgggcgtctga

SEQ ID NO: 3171 - protein, 114 aa, Myceliophthora thermophilia
MPSSSTTTTTTTSERTRASHPSNNTKSPADMSSQPSYTTTTTTTTTAAADNQARRSVDADAASVATTSSLSSRITLLKDKLHHNHHHSSTSVSSSREEQERKESVLRNQIRMGV

SEQ ID NO: 3172 - DNA, 1596 bp, Myceliophthora thermophilia
atgaacaagccttcagtcgcaccccaccgcaagcgcaaacgcaccccctcggacccagtcatcaaccctctctctcaccccccggacactctcaggcaattcgccatcgccggctacccgatccacaaaccggtcccgtccaaagcctatccgggctttcctcaccgcgccccgcggccccaaagagcgcacggtggtagcggcgacgacgacgacaacaacgacaacgaccacagaaatgacggcggtgatggccacctggacaataccgatgccgacgcgggcccggcgtctcgatctcgatccgccgccgcggcaagcgacgccgatggcgaacaggaagacgacgacgacgacgatggagggtggcggacgaccgacggcgagaccaccgaggccgagacggaccgctctcgcggcggcgccaccacggacggcgggagggagtcgaagcgccacggaacggggaaagggacggggacggggaagggaaaggggaaggggagggagagccggggtggtggtggggaggtggaccggctcgcgcaggcctaccgcgcgcgcgtcgggtggctgacggccgtggtgcggcggtgcctggccgagggggacgtggcgacggcgaagcgggcgtttgggctgctggtgcgggcgcgcgtgtacgggcgcaaggtggatctgcggcgggagcggtactgggagatgggcgccgagatcctgatgcgcgagggcgaacggacggccaggcggcgggagctgcccgggagggaagagggcgggagcgatgcggagggggggttaatggaggaggaggaggaggaggaagaagaagaagaggaaaacgaggaggccagggccgcgaggttcgcccgcctccgggcgtactacgagtacctcatccaacagtacccgtatagcaagcagcatcccggcaccgctagcagcgtgatggatttccaggtggccctgttcagcgccgagatggaggaggctcacgctgcgcacaggaggggcctggagaggctgcagcggggcgatgggtgggacggagagggtgatgatgaggaggtggtggcggaggagaaggaggaggaggaggaggacatggatgtggatgagccgatgatggactacggcccggcaagacacaaaacgggccgggagcatgaaggggaggaacacctgcgaggcctcagccgccgcgagctccggctgcgcgacaaggaaaaccatcttcggctcgaggcgctccgacgcatggaagacgtcgcgcagcggatggacaccgtcatggagacgttgccgttcgctcgggaccatgagctgctcaggttgagggccatggtagcgctctacattggagatctgtgcgtgcctcccccaccgcggtcaacgctggaggaggaggaaggtaaaaaagcacgggctggtcagcgcatgaaagcgaaacgcctcttgcgccagatcaaggaggccggcggaaggctaagggaagatggcgaacagcttctcgagtctctggtgtcggatgacgaggatgacactccagacgagggtcaatcggtgctccccatgttctcgtcgatgcaagtctga

SEQ ID NO: 3173 - protein, 531 aa, Myceliophthora thermophilia
MNKPSVAPHRKRKRTPSDPVINPLSHPPDTLRQFAIAGYPIHKPVPSKAYPGFPHRAPRPQRAHGGSGDDDDNNDNDHRNDGGDGHLDNTDADAGPASRSRSAAAASDADGEQEDDDDDDGGWRTTDGETTEAETDRSRGGATTDGGRESKRHGTGKGTGTGKGKGKGRESRGGGGEVDRLAQAYRARVGWLTAVVRRCLAEGDVATAKRAFGLLVRARVYGRKVDLRRERYWEMGAEILMREGERTARRRELPGREEGGSDAEGGLMEEEEEEEEEEEENEEARAARFARLRAYYEYLIQQYPYSKQHPGTASSVMDFQVALFSAEMEEAHAAHRRGLERLQRGDGWDGEGDDEEVVAEEKEEEEEDMDVDEPMMDYGPARHKTGREHEGEEHLRGLSRRELRLRDKENHLRLEALRRMEDVAQRMDTVMETLPFARDHELLRLRAMVALYIGDLCVPPPPRSTLEEEEGKKARAGQRMKAKRLLRQIKEAGGRLREDGEQLLESLVSDDEDDTPDEGQSVLPMFSSMQV

SEQ ID NO: 3174 - DNA, 1209 bp, Myceliophthora thermophilia
atgtcctcgatagcccgtgttcagggcatgcgggcgcgggcattgaccatcatggccacccgctctcaggaccaggacctcgtggcgtcggtcgcggccaagagcggtatccgggaccggtcggcctttgcctccgtgccggacacccagaatgcgccggagaagatcgtgccggcgtttggctggcacccttggttctcgtaccagctctacgacgacaccgagggcagcggcagcggcagcagcaccaccactgacgacccagcgtccacaagcccggccgcgtacaaggccaagcactacagcgccgtgctcaccccgcagccggacgacacgttcatcgactccctcccggacccagtcccgctcagcacctttctcgccagcacccgacagcgcatcctcgacgccggcgggcccgcgctcatcggcgaggtcggcctggacaaggcgttccggctgccatggccctggaaccaccccgccaacgcggccgtgatgaccgggcaacagcggcgggccgaccaggagaagaaccaggacggccgggaggaggaggaagaggggcagctcacgccgggcgggcgcgagggccgcacgctgagcccgcaccacgtcaggatggcgcaccaggtggcggtgctcaaggcgcagctccggctggcgggcgagctgggcgtggcggtcagcgtgcacggggtgcaggcgcacggggtgctcttcgacgcgctggcgtcgctgtggaaggggcacgagaaggaggtggtgtcgaggcggaagcagaagctggtcgccgagggggcggaggacttttcgtcatcagaggaggaggaggaggaggagaagaaaaagaaaaagggtggctacaagccggtgccgttcccgccgagggtgtgcctacactcgttcagtggctcgccccagatggtgcaccagtacctgaacccggccattcccgtgcgcgtcttcttctccttctcgaccgtcatcaacctctcgacggccggcggggaaagcaaattccccgacgtcgtccgggcctgtcccgacgaccgggtactggtggagagcgacctgcattgcgcgggcgaggagatggaccgggtgctggaggatatctgtcggcgggtttgcgagattaagggctggacgctggaagagggcctagcgaggatacggaagaactatgagcagtttgtattcggctga

SEQ ID NO: 3175 - protein, 402 aa, Myceliophthora thermophilia
MSSIARVQGMRARALTIMATRSQDQDLVASVAAKSGIRDRSAFASVPDTQNAPEKIVPAFGWHPWFSYQLYDDTEGSGSGSSTTTDDPASTSPAAYKAKHYSAVLTPQPDDTFIDSLPDPVPLSTFLASTRQRILDAGGPALIGEVGLDKAFRLPWPWNHPANAAVMTGQQRRADQEKNQDGREEEEEGQLTPGGREGRTLSPHHVRMAHQVAVLKAQLRLAGELGVAVSVHGVQAHGVLFDALASLWKGHEKEVVSRRKQKLVAEGAEDFSSSEEEEEEEKKKKKGGYKPVPFPPRVCLHSFSGSPQMVHQYLNPAIPVRVFFSFSTVINLSTAGGESKFPDVVRACPDDRVLVESDLHCAGEEMDRVLEDICRRVCEIKGWTLEEGLARIRKNYEQFVFG

SEQ ID NO: 3176 - DNA, 2454 bp, Myceliophthora thermophilia
atgccttatgccatggcctccgagcagcctctcgctgaaccgccgccgcagccgccgcagccgccgccgccgccgcctccgcgggcctctgtgcccgaaccggcggcgataaagctgacgcgcggccactcgtgcgtactctgtcagcagcgaaaggtccgctgcgacaagcaaaagccgtgtgccaactgcgtcaaagcccaggttgagtgccgtgtggtccccccgcagccgccccggcgcaggaagaagaagccgcatgagcgagacctcatcgagcgcctccggaaatatgaatccttgctggcccaacatggtgtcaagttcgaacccatcgcccacgagctcaggccatctgaccacgcggacgatgttgccgaccttgagcaggatctcagcgggctcaagacgtccccgtcgagcgccgccgaccatctatcgccggatcagggtcacgacaaacaaagatgggctcccgccatccgcgagtaccgaggagacgcggatgatgactcctccgacgaggaacaagagggccggacaatacacaatgcctacgacaccatgttcgagaacagcgacggttttccgttcgttgttggcggatcagtggctagcgtgacttccgcccacccctcgccaatccagatcttccagttatggcagttttatatcagcaatgtcaaccctctactcaagatcacgcatacgccgacgttgcaggctcagatcatcagtgctagcgccaacccagccaagatttcccgacctctcgaggccctcatgtttgccatttacttcgccgccgtaacctccctgagcgaagacgaggtccacagcacgtttggcgaagacaaggctatcctcttagggaagtaccacaacgcgacccagcaggcgcttatcaacgccggcttcatgcgctcctccgacttggtggtgctgcaggcatttttcctgtatctgctgtgtgctcgcccatacgttgacccccggtccatgttttgccttctcggtatggcatttaggatagccacccgcttaggcctccaccgagatggatcccagccaggcttgtcgccgtttgaggcggaacagcggaggaggctgtggtggcagatcgtcgtttttgacaagcgcatcgcagaaatcaccgggtcgacagtgacggccctctcatcttgcgcctgcgacacaagattgccactcaacatcaacgatgccgatctgaacgtccatgccaaagggcagccaggcccgtaccccggaccaaccgagatgattttctgcctgactcgcatagagctcaccgtggctgcgtcacctgatagtatccggcggaccatcaccacccccggaggtcggccgttacaccaacccatggtgcatttcgagccctccccctcttcccccgacgtggtgtcacacgcggccaaccaaagcctgccggacaaccttgctcagttctgcgcctacgtggaaagcgtgtacctcaagcagtgcgatcccaagattccgctccactactttacccttctcatgacacgtcaagcgctgtgcaagctgcgcatcattgatttcctctgcaggacggccaatgcgaaccacgtcgaccaaggcgagcgcgacagctatttcatggaagccctccgcatggttgaatatgacaacgcccttcagagctcggatatgctgcagggctttcgctggtacacgtacgcccacttccccctgcctgcctacctttgcctagtctcagaactccggcaccgaaccacgggcgagctctgcgagcgtgcctggaacgtcatgatcgagaaccacgagcggcgcggcctgctgcggcgcctcaaccgtaaccccttgcacatcgcctttggtcactattttcttaaggcttgggatgctcgcgaggccgcagagttgcagctgggccgttcgctacccacgccaaaggttgttacgctgctgagggcaacgctggccaagacgaggcggccgacttcggcgcgtaatcgagagcccaatactatgacgatgggaacgccgagcgggagccagcaagttcccgtccagcccgcgatggccccccgatcgaccgattcactggggatggcatctgttggtgaaatgcatacgattccgggaggcatgccgtcgactgggatgtaccacagcaagccgatgccacattccaccacggcgacgtcgactacgtcgacgacgacaacgccgtcaatggctgggatgggcgccggccacaccatgatgatggatgactcgatgatgtatccgggatacgacaacgtggcgcctatgtatgctgcgccggcgtcaatgcaggacccggagctaggcggtggcatagattgggattatcttgttcagatcacgtcgttgagcggcttcaaccctgcaggtagctactacgttcagcagggcacagggacttag

SEQ ID NO: 3177 - protein, 817 aa, Myceliophthora thermophilia
MPYAMASEQPLAEPPPQPPQPPPPPPPRASVPEPAAIKLTRGHSCVLCQQRKVRCDKQKPCANCVKAQVECRVVPPQPPRRRKKKPHERDLIERLRKYESLLAQHGVKFEPIAHELRPSDHADDVADLEQDLSGLKTSPSSAADHLSPDQGHDKQRWAPAIREYRGDADDDSSDEEQEGRTIHNAYDTMFENSDGFPFVVGGSVASVTSAHPSPIQIFQLWQFYISNVNPLLKITHTPTLQAQIISASANPAKISRPLEALMFAIYFAAVTSLSEDEVHSTFGEDKAILLGKYHNATQQALINAGFMRSSDLVVLQAFFLYLLCARPYVDPRSMFCLLGMAFRIATRLGLHRDGSQPGLSPFEAEQRRRLWWQIVVFDKRIAEITGSTVTALSSCACDTRLPLNINDADLNVHAKGQPGPYPGPTEMIFCLTRIELTVAASPDSIRRTITTPGGRPLHQPMVHFEPSPSSPDVVSHAANQSLPDNLAQFCAYVESVYLKQCDPKIPLHYFTLLMTRQALCKLRIIDFLCRTANANHVDQGERDSYFMEALRMVEYDNALQSSDMLQGFRWYTYAHFPLPAYLCLVSELRHRTTGELCERAWNVMIENHERRGLLRRLNRNPLHIAFGHYFLKAWDAREAAELQLGRSLPTPKVVTLLRATLAKTRRPTSARNREPNTMTMGTPSGSQQVPVQPAMAPRSTDSLGMASVGEMHTIPGGMPSTGMYHSKPMPHSTTATSTTSTTTTPSMAGMGAGHTMMMDDSMMYPGYDNVAPMYAAPASMQDPELGGGIDWDYLVQITSLSGFNPAGSYYVQQGTGT

SEQ ID NO: 3178 - DNA, 1032 bp, Myceliophthora thermophilia
atgcaggccgaggcggacggctctcctccggggatggagcagagcgagatggccgaaacccacggcgacgatacccggcgcgaggaagcaagcggggtcacctccgactatgagccgagcgaggaggacactgctacgttcggttctgttacttcgagcatcaacgaacacgtgtgggagtacggtaggaggtaccacgcctaccgttgcaggagatatcccattccgaacgacgaggaggagtacaagcgagagtcgctgcggcacctgatgctcaaggatctcctcggcggcaggctatatttggctccgatcgggaacaatccgcagaagatcatcgaccttggtacggggttcggggactgggccattgaagtcggtgaggcgttccccagcgccagggtgacgggggtggatctctcacccattcaaccacactggatcccgccaaacgtcgagttcatcgtcgacgacatcgaggacgaatgggcgcatgccaacgactacgactttgctcacttccgcttcgtcaacaccatgctaagagacaacacggcagtactgcgcaaagttttccaaaacctgaaaccaggcggctgggttgaagtccaggacatagtcccccgtctgtcgtgcgacgataacactgtcacgccggaccaccccctgatcaagttcttctcgatggtcaagcctgtgctgagggagaagtacggattcgagatccgggtactcgacacgctgcctatcctcttgcagaacttgggcttcgtcaacgtgcaccgcaagatcttccacatgcccctgggcgagtgggcgcgagacccgcacttgcggctcctcggcggttactttcgcgagatcatgatcggcttcgtgggcgccatggccgtgcggcccctcgtcgaggccggctacgagaaggacgagatcagcgatgtggtcagggccgtcaccgaggccgtcggaaacaggcgcctccatggctatctgcccatccactttgtctgggcccagaaagcgcccacttga

SEQ ID NO: 3179 - protein, 343 aa, Myceliophthora thermophilia
MQAEADGSPPGMEQSEMAETHGDDTRREEASGVTSDYEPSEEDTATFGSVTSSINEHVWEYGRRYHAYRCRRYPIPNDEEEYKRESLRHLMLKDLLGGRLYLAPIGNNPQKIIDLGTGFGDWAIEVGEAFPSARVTGVDLSPIQPHWIPPNVEFIVDDIEDEWAHANDYDFAHFRFVNTMLRDNTAVLRKVFQNLKPGGWVEVQDIVPRLSCDDNTVTPDHPLIKFFSMVKPVLREKYGFEIRVLDTLPILLQNLGFVNVHRKIFHMPLGEWARDPHLRLLGGYFREIMIGFVGAMAVRPLVEAGYEKDEISDVVRAVTEAVGNRRLHGYLPIHFVWAQKAPT

SEQ ID NO: 3180 - DNA, 3084 bp, Myceliophthora thermophilia
atggcgccctctgcggcccaagaagcggccgcaaccctaccaaccggcccggcccgcaacttcatggatctgccgcaagaggtgcagagagagatcttcagacagtgctcgaataaggacctgatctgcctcgccacggtgtcgaggcacttccgcgaccttgctgctgccgaactgtaccgagactttaagattgtcttcccggaaggcaacaggcgcccagaggacacgtctttcgaccctctcgccctcggtcttgacacctttgcgacgagcgactacaactatgcccgctacctcaggcgcatgactttcgacacggtcaccttggattccactgcagccgtctcgtaccgcccctatcattccaccctcagctgcggcaagtttatgaacacgcttcttctcttggcgctgcgcaaggcacagtctctcgagtcctttaagtggaacatcggagtcgagctcagccgtccagtgtacaaggagttgcatcagattccggcactctcgcatgtccacataaggctccagaccttaccatcgcgataccagagtgcctcgtcccccacattcggcgcctcgaattccacatcctcgccagcatcggtccatgttgcgcctataccttcagttccccctccccttcctccgccggtctttgcgtttggcgcccaaggtccttcagatggtgtgttcgagtcctcctcggtaccgccgggcccgtcgtctgggctcaagcaggcccgttccagatctccgaggaaagggtttctgaacagagagcatccgaccttgtctggcttcaaggggctcaagagcctcgccgttctagacattgacaacctcgacattgtgccagaactccagtcggccgttcgaaactccgccgggaccctctcggaactcaagctgtctttctcggagaagcttgcctctgcagcccgcaatcaccaggccaacgtctctgattctgaagagtcagaccaggaagatggcataatgcccgtcccgttagaagacgtcggaatgagtgaacaggccagagacttccgggcacagcaggcaaggaaggttcaggagacggttttggccaggattctcgatgccgagccgacgccggcagaggagctggaggcagccgtggtggagactgaaaagaagaagaataagaataagaataagaagggcaaggcgaggaccgagcaagagttggttgatatgatcaagacgatcacgcccaaactcatgggtgagctaaacggcaccaaggagttcgccgcatcgcaagacattaccgatatgattggcctcgctgcccggaagtacgtcgaggaggccaagtcacgcggagagaaggcagaccaggaccagaacggagccgacggtgctccgtcgagtatcagcgagccatctgacaaggccgcggaaggtgtgtcctctgaagcaagtgctcccgaggtgagcctctttggagagtcggcagcctccaagaaacccaaggatcacaggcgggtcgcggatcccgacgacatagatatcgaagagccactagaacagctcgctatcgatgccggagagccaccagccggtgaagcgccaggggatgaaacagcaacgtcagcggacaacccggcgcttgccgacacgaggacgagatatggagaggctctagccactctcaagttgcagaaagccgagttcaaggctctggctgaagaactacaaacgttcgaatctcaggccagcgctttgggcgacgagatccggcggtggcgggcggccaactctcccgccaaccttgattcccttggcgatgccgagtcgcagttactgaggctcacgcggagcatccgagatatgcaggagcagatcagcgcgtgccagtctgcgatcgaatgtgccgataagtcttcggcaggcgaggtctggtcgtgcaaggagcatgctcgccaggtgcgcgactacatccgggacaccagaggactcgccctcgagtctcttagcatctttctcattccgacaaaggcgtcggttctgtccaaggccgtcgatctccgcgtccttcgccgcttgacgctgctcaacgtgggtatccaggcgccaatctgggcactgcttcacagggagaataaggaagccccgctgccgctgcgcgaggtctttaccgacaatgtctcgctcagctttctgaactgtatcgcctcgcttgaggaggtgcgcgagctcctgatgctcgaacgggaccctagcgagaaacccgagagcttcgcgccccggacgcaaacgaccatggaccagatccgccgcatcgttcttaggaagcatgctccaacaatacgaaacctcatgataaagaacctggccgatgcggcctgggatgtagacgagaagacggtcctgctgctaagtaggcgtggaaagaggctcgaggagctggcttgcaacatgaacgtccgaacaatgcattgcttcgcgcagcatgtcaatgccttcaagactctccgcgccctgcacgttcaccatctgcataacagcgatacctgtgtctgggttgtgcgcgagactaagcgtttccttgttgacagcatctcgcataacccggacctcaagctcgactggattgccattgacgaggatgagcgcgccgacaggattatgcggctgtccgagtgggtgaagctcgatacgggtgaatggtgccacaaggatgatctcgagcacgggctcaaagatgctgcggagaagaataagaataagaagggcaagagcaagcatcatagctcttcttcgtcatcatcatcatcttcttcttcctcccccccttcttcctcaggcccgctttcggcgcaattagcgtcgggcgtcggcgtcgaggatctggatgtcagcgctatcattgctgccgagctgggcgagaacggcggagacagtagttcaagcgagaatgggattggcgactccagtgacgaggatggggatgagttcctgggacagaagaccagtctataccagggtgttatgttctacgaggtggacgacgtgagaatctttgagaaggaggtcgtcgctggaaggctttga

SEQ ID NO: 3181 - protein, 1027 aa, Myceliophthora thermophilia
MAPSAAQEAAATLPTGPARNFMDLPQEVQREIFRQCSNKDLICLATVSRHFRDLAAAELYRDFKIVFPEGNRRPEDTSFDPLALGLDTFATSDYNYARYLRRMTFDTVTLDSTAAVSYRPYHSTLSCGKFMNTLLLLALRKAQSLESFKWNIGVELSRPVYKELHQIPALSHVHIRLQTLPSRYQSASSPTFGASNSTSSPASVHVAPIPSVPPPLPPPVFAFGAQGPSDGVFESSSVPPGPSSGLKQARSRSPRKGFLNREHPTLSGFKGLKSLAVLDIDNLDIVPELQSAVRNSAGTLSELKLSFSEKLASAARNHQANVSDSEESDQEDGIMPVPLEDVGMSEQARDFRAQQARKVQETVLARILDAEPTPAEELEAAVVETEKKKNKNKNKKGKARTEQELVDMIKTITPKLMGELNGTKEFAASQDITDMIGLAARKYVEEAKSRGEKADQDQNGADGAPSSISEPSDKAAEGVSSEASAPEVSLFGESAASKKPKDHRRVADPDDIDIEEPLEQLAIDAGEPPAGEAPGDETATSADNPALADTRTRYGEALATLKLQKAEFKALAEELQTFESQASALGDEIRRWRAANSPANLDSLGDAESQLLRLTRSIRDMQEQISACQSAIECADKSSAGEVWSCKEHARQVRDYIRDTRGLALESLSIFLIPTKASVLSKAVDLRVLRRLTLLNVGIQAPIWALLHRENKEAPLPLREVFTDNVSLSFLNCIASLEEVRELLMLERDPSEKPESFAPRTQTTMDQIRRIVLRKHAPTIRNLMIKNLADAAWDVDEKTVLLLSRRGKRLEELACNMNVRTMHCFAQHVNAFKTLRALHVHHLHNSDTCVWVVRETKRFLVDSISHNPDLKLDWIAIDEDERADRIMRLSEWVKLDTGEWCHKDDLEHGLKDAAEKNKNKKGKSKHHSSSSSSSSSSSSSPPSSSGPLSAQLASGVGVEDLDVSAIIAAELGENGGDSSSSENGIGDSSDEDGDEFLGQKTSLYQGVMFYEVDDVRIFEKEVVAGRL

SEQ ID NO: 3182 - DNA, 354 bp, Myceliophthora thermophilia
atgagagacacagtccaaagagtgggtatagcgacccccatcgtgaaagaacacagtgttaagggacaagatgacaaccgcgagacaccgctagtctctcggattggccgaaagtcttcgggcagctccttcgggcgctactgtgacggcagatgcatgtcaggctgggctgcctttttctcctgcctccactttgggatgcgggatcagcataccgtgctcggcgaccctaactcgcgccttgtgttggggaagagtgggtggacacgttttcgtatgtctccgcgggcgtatgcatcgatcatgattgacgaagagcccggcgagctgcgggaccgaatggccgaccagtga

SEQ ID NO: 3183 - protein, 117 aa, Myceliophthora thermophilia
MRDTVQRVGIATPIVKEHSVKGQDDNRETPLVSRIGRKSSGSSFGRYCDGRCMSGWAAFFSCLHFGMRDQHTVLGDPNSRLVLGKSGWTRFRMSPRAYASIMIDEEPGELRDRMADQ

SEQ ID NO: 3184 - DNA, 3423 bp, Myceliophthora thermophilia
atggctgcggaattccccaaacaccccttcctcctctcggttcgggaggttgagcaggccctcggcaccaacgtcgacaatggcttgagctcctccaaggctgccgagctgcagcaaaagtacccccccaacgagttggacgtcggcggcagcattgcgtggtacaccatcttcatcagacagctgtgcaatgccatgattctggttctcttctttgccatggcactgagctttggcgtctccgactatatcgaaggtggcgttctggctgccgtcatcgtactcaacgtctccatcggcttttaccaggagtatggcgccgagaagaagatggatgctctccgggccctgtcctctcccagtgcaagcgtcctgcgggacggtaagaccattgtcatcccaaatgcgcaagtggttcccggcgatatcgtcaacctcaagatgggcgacacggtccccgccgatgtgcgcctatttgaggccatgaatctgacgtgcgacgagtcctcgctcacgggcgaggccattcccgtcgagaagcagatcgacaacgacatcgttgttcccggcaccgagaagcttgccgtgtccgaggacgaggtcggcattggtgaccgcatcaacatggcgtacgccaccaccacggtgcaaaagggccgcggccgcggtatcgtcgtggccacgggcatgcagaccgaggtgggcaagatcgcggcctcgaccaacaagaagcgccgcaaggctggccggtcaatgaactggaggaagtatggcaagacgcagcccatcaagggcgcctttcgtcggacctacgattttctgggcaagttcttgggcttgaccgagggcacgccgctgcagatcaagctgtccaagctggcttaccttttgttcttttgtgcgatcctgctggccatcatcgtgttcggcgtgaacaagtttgtccagccgctgcccaaggaggttgtcatttacgccatctcgacaggcatcgccatcattcccgagtcgctcgttgccgttttgaccatctcgatggtggtggcgaccaccgtgatgaggaaggcaaacgttgtcgttcgcgatctctccgcacttgaagccctcggtggcgtcactaacatctgctcggacaagaccggcacgttgacccagggcgccatgatcgtaaagaaggtctggctaccgcccgacaaaatctacaccgtctcgggctcgacggatcccagcgacccttacaagggcactgtgagggaccagccgcaagccgaggaaaagaagcgcgactttgaccaggagcgcacgacgcaagccgtcaagtttgacggcgttcccgacgagaagctcaacccgacgccggccgagaaggccaagatggccgagttgacgcccgagctccgcttgttcatgctctcggcggcgctctgcaatctggccacggttcgttacgacgaaggcgaaagcgcctggaagaccacgggcgagccgaccgagatcgccctgcaggtcttcgcgcaccggtacgaccgcaacaagaaggccatggaagcgctcggctggcggcaggtggccgagtttcccttcgacagcaccatcaagcgcatgtcggtggtctatgaggcgcccccggacaacgacgccgagctcgacccttccaacagtgtcgtcttcaccaagggcgccgtcgagcgtattctcgacctgtgctcgcacgtcggcaccggctccaaccagcaacccatgacggccgagatgaaggagcagatcctcgaccagatgaccagctttgcctcgctcggccagcgcgtcttggccgtggcctaccgcccctggcaaggcaggtacacagccgatcggacattctcccccgccaacgaggacgacgaaaaggtggccgaggcatctccggcggaagacgcagcccgggccgccgtggaacagaacctgattctgctcggtctcgcaggcatctacgaccccccacggcgcgagacttcgccctccatctacgagtgctccaaggccggcatcaaggtgcacatgctgacgggcgaccacccggagacggccaaggcgatcgcaaaggaggtcggcatcatcccgaccaacatgagcgtgctcccggccggcgtggccgagacggcggtgatgaaggcgaccgactttgaccggctgtcggacgccgagatcgacgcgctgccggaactgccgctggtgatcgcgcggtgcgcgcccgagaccaagacgcgcatggtcgaagcgctgcggcggcgcgacgccttcatggccatgaccggagacggcgtcaacgacgcgccgtcgctgagcagggccgacgtcggcatcgccatgggctccgggagcgacgtggccaagtcggcggccaagatcgtgctgacggacgacaagttcaacagtatcgtcgcggcgatcaaggagggcaggaggatgtttgagaacattcagaagtttgtgctgcacttgctgagcagcaacgtcggcgaggtcatcctgctgatcgccggcctggggttccaggacgagtcgggcctgtcggtgttccccatttctccgctggagatcctgtggatcaacatggtcacctcgtccttcccggctttcgggctgggccgggagaaggccagccccatggtgatgcggaagccgccgcaggacaagcggcgcggcgtcttcagcaaccagatcctcgcagacatgatggtgtatggactgctgatgggcatctgcacgctcatgacctttgtcattgtggtgtatgggaggtacgacgggcagctcggccacgactgcaaccgcaagttctcggactcgtgcattcccgtgttccgggcgcgggcggccgtcttcgccgagctcacctggctcatcctgctcagcgcgtgggaattcaaggacatccggcggtcgctgttccggctcaaccccaatgatacgtcgcggttcccgctgttcaaggacctgtacaacaacccgttcctcttctgggccgtcgccatcggcttcgtcagcgtgttcccgaccgtctacatcccgtatctcaatcgggatgtcttcaagcacacgtccatcagctgggagtggggggtcgtgatcggcatgaccatcgtctatgtcctgggtatcgaggtgtggaagtacgtcaagcgcaggctgaacatcctcgacgaccacaaggtggtccaaggtccttggtcgcagggcgaggaggtcaccaaaaagtaccacaagagcttgggtcttggccacctcaagaactggctgagcgccgggcgcacgctgagtgccagccgaaccgagtccaggtccaaggcgccgtcaactgccgcgttgacgccggtgacgacgcagcagggaacgcagcaagagacacagcagggaagcagcgcgctgccgccggtttga

SEQ ID NO: 3185 - protein, 1140 aa, Myceliophthora thermophilia
MAAEFPKHPFLLSVREVEQALGTNVDNGLSSSKAAELQQKYPPNELDVGGSIAWYTIFIRQLCNAMILVLFFAMALSFGVSDYIEGGVLAAVIVLNVSIGFYQEYGAEKKMDALRALSSPSASVLRDGKTIVIPNAQVVPGDIVNLKMGDTVPADVRLFEAMNLTCDESSLTGEAIPVEKQIDNDIVVPGTEKLAVSEDEVGIGDRINMAYATTTVQKGRGRGIVVATGMQTEVGKIAASTNKKRRKAGRSMNWRKYGKTQPIKGAFRRTYDFLGKFLGLTEGTPLQIKLSKLAYLLFFCAILLAIIVFGVNKFVQPLPKEVVIYAISTGIAIIPESLVAVLTISMVVATTVMRKANVVVRDLSALEALGGVTNICSDKTGTLTQGAMIVKKVWLPPDKIYTVSGSTDPSDPYKGTVRDQPQAEEKKRDFDQERTTQAVKFDGVPDEKLNPTPAEKAKMAELTPELRLFMLSAALCNLATVRYDEGESAWKTTGEPTEIALQVFAHRYDRNKKAMEALGWRQVAEFPFDSTIKRMSVVYEAPPDNDAELDPSNSVVFTKGAVERILDLCSHVGTGSNQQPMTAEMKEQILDQMTSFASLGQRVLAVAYRPWQGRYTADRTFSPANEDDEKVAEASPAEDAARAAVEQNLILLGLAGIYDPPRRETSPSIYECSKAGIKVHMLTGDHPETAKAIAKEVGIIPTNMSVLPAGVAETAVMKATDFDRLSDAEIDALPELPLVIARCAPETKTRMVEALRRRDAFMAMTGDGVNDAPSLSRADVGIAMGSGSDVAKSAAKIVLTDDKFNSIVAAIKEGRRMFENIQKFVLHLLSSNVGEVILLIAGLGFQDESGLSVFPISPLEILWINMVTSSFPAFGLGREKASPMVMRKPPQDKRRGVFSNQILADMMVYGLLMGICTLMTFVIVVYGRYDGQLGHDCNRKFSDSCIPVFRARAAVFAELTWLILLSAWEFKDIRRSLFRLNPNDTSRFPLFKDLYNNPFLFWAVAIGFVSVFPTVYIPYLNRDVFKHTSISWEWGVVIGMTIVYVLGIEVWKYVKRRLNILDDHKVVQGPWSQGEEVTKKYHKSLGLGHLKNWLSAGRTLSASRTESRSKAPSTAALTPVTTQQGTQQETQQGSSALPPV

SEQ ID NO: 3186 - DNA, 294 bp, Myceliophthora thermophilia
atggacaagggtcggtttgtggccggcccatgcccgctcctgggcaaccattggagggctgcactgcatccgcacttgtcaaccgcctcaatatcgtcggatagcaccaaaactacttcggccagcgcccatcgcctcaatatgcccgggtcgggtcggtcagcccaagcgggagctaaccatccgcttggcatcccaccgccacccaatacagaaggcccgggttctggttaccgagaatacgctgccagcagccctcgtacatcttcctcgaccttctccgagatcacttga

SEQ ID NO: 3187 - protein, 97 aa, Myceliophthora thermophilia
MDKGRFVAGPCPLLGNHWRAALHPHLSTASISSDSTKTTSASAHRLNMPGSGRSAQAGANHPLGIPPPPNTEGPGSGYREYAASSPRTSSSTFSEIT

SEQ ID NO: 3188 - DNA, 192 bp, Myceliophthora thermophilia
atgttaaagtcgcgctccctttcggcagagacggcatcaaaaagcacatgggaagaagatgactcagagcttgaaatgaccgacgtgtttcctgacggctccaagtacgagctgaagaatggtgaggcagcggccacacccgaggagcgtcacccacccagttctccgcaatctcttccagcaagaacataa

SEQ ID NO: 3189 - protein, 63 aa, Myceliophthora thermophilia
MLKSRSLSAETASKSTWEEDDSELEMTDVFPDGSKYELKNGEAAATPEERHPPSSPQSLPART

SEQ ID NO: 3190 - DNA, 984 bp, Myceliophthora thermophilia
atggctcccagaaccgatttcccgccggtccgggcctgtctcttcgacatggacggcctcctcctggacaccgaagatctctacacgctctgcatcaacctggtcctggagaagtaccagcgccccaaactgccatggagcatcaaggccaagctccaaggccgcccgggccccgccgccaccaagctcttccgcgaatgggcccagctgcccatcagccaggaggagtacctcgaggagcttctcgccctgcagatgaagcacttccctacgacccagcccctgccgggcgtgcccgagctcctctccagcctcggccgcactcgctactgggacctcaagaagaataaggaggcgaccacctcctcctcctcctccgccgacggctccgccgccaccgcccccagcaccacgcctcaccgggtgcacatcgccctggcgacgtcgtcgcacgagtccaacttccgcctcaagacggaccacctgcaggagctcttctccgtcttcccgaccgcccgccgcgtcctcggcgacgacccgcgcatcccgcccggccgggggaagcccctgccggacatcttcctggtggccctccggaccatcaacgagtccctgccgccgggggagcggccgatcaggcccgaggagtgcctcgtcttcgaggacagcgtgcccggggtcgaggcgggcccgcgcgcgggcatgcgcgtcgtgtgggtgccgcacccgaagctcaaggaggagtacgccgggcgcgaggccgaggtcctggccggccgcacgggcgaggcgggcgacgtggacccgcaccagctcggcgagatcgacgacggctgggccgagtacctgccctcgctcgtcgggttcccgtacgagaagtacggcatcgtcgtgccgccccccgaggtggagaaggaggagtgcatgcttgagggtgctcaggtggcggagggcgaggtcatgcaggtcgtggggactgcgtga

SEQ ID NO: 3191 - protein, 327 aa, Myceliophthora thermophilia
MAPRTDFPPVRACLFDMDGLLLDTEDLYTLCINLVLEKYQRPKLPWSIKAKLQGRPGPAATKLFREWAQLPISQEEYLEELLALQMKHFPTTQPLPGVPELLSSLGRTRYWDLKKNKEATTSSSSSADGSAATAPSTTPHRVHIALATSSHESNFRLKTDHLQELFSVFPTARRVLGDDPRIPPGRGKPLPDIFLVALRTINESLPPGERPIRPEECLVFEDSVPGVEAGPRAGMRVVWVPHPKLKEEYAGREAEVLAGRTGEAGDVDPHQLGEIDDGWAEYLPSLVGFPYEKYGIVVPPPEVEKEECMLEGAQVAEGEVMQVVGTA

SEQ ID NO: 3192 - DNA, 1086 bp, Myceliophthora thermophilia
atggcctccggctgcgcggcctcggcctcacgagggaacggcctcgagaagctccccaactcgtcgatccgcgtcttgcgcacggtctcggccgtccgccggtggcgccgcccgcacctcctcgaccagcgctccgtcgccctcgtccccaccatgggcgccctgcacgagggccacctctcgctgatccgcgccgccgcccgcgagaaccaccacgtcgtcgtctccctgtacgtcaatccggcccagttcggcgtgcgcgaggacctggccagctacccggtcacctgggacgccgacgctgaagccctggtccggctggaccgcgagctcgccgacgatggtcacaacctgggccgcatcagtgccgtcttcgctccgacgaccgccgagatgtaccccggcgggttccccggccaggaggtggacagcaaaggcagcttcgtcaccatcacgcccgtgggcgagctgctcgagggccggtcgcggccgaccttcttccgcggcgtggccaccgtctgcatgaagctgttcaacatcgtgcagccggagcgcgtctactttgggcagaaggacgtgcagcaaaccgtggtcatcaagagactggtgcgcgatttcatgctgcccatcgaggtcgtcgtgtgcccgaccgcgagagccgaggaggacgggcttgcgctgagttccaggaatgtctatctggggccaaggagaagggcggtggcgcccgtgctctacaatgccctgagggccgccgaggacgcctatacgggcggtgccagggaccgggcgacggtcctcggtgcggccgagagccttgcggcgcgcgtactggcggaacagacggcgctgggcccagagaagagggtgcgcttcgaggtcgactacctctccctcgccgaccccgacaccatggaggagctggaagtcgtcgatcccgcaaagggaggcattctgagcggcgcggtcaagatgctgcccgtcgaggcccctggggagggtgaagatctcggccatagcgggggcccgcccgtcaggttgatcgacaacatcatccttccgggcatcgagacaaagtccgactga

SEQ ID NO: 3193 - protein, 361 aa, Myceliophthora thermophilia
MASGCAASASRGNGLEKLPNSSIRVLRTVSAVRRWRRPHLLDQRSVALVPTMGALHEGHLSLIRAAARENHHVVVSLYVNPAQFGVREDLASYPVTWDADAEALVRLDRELADDGHNLGRISAVFAPTTAEMYPGGFPGQEVDSKGSFVTITPVGELLEGRSRPTFFRGVATVCMKLFNIVQPERVYFGQKDVQQTVVIKRLVRDFMLPIEVVVCPTARAEEDGLALSSRNVYLGPRRRAVAPVLYNALRAAEDAYTGGARDRATVLGAAESLAARVLAEQTALGPEKRVRFEVDYLSLADPDTMEELEVVDPAKGGILSGAVKMLPVEAPGEGEDLGHSGGPPVRLIDNIILPGIETKSD

SEQ ID NO: 3194 - DNA, 1578 bp, Myceliophthora thermophilia
atggctggtcctgtcccaatcgcccattctttgggtgatatctacacctccgatgccctgccctcacagaccaaacgatggaacaagctggtgtctcaattcgaggcgaagtacggtcatggccccgaatttgtctcccggtcaccaggccgagtgaatatcatcggtgagcacatcgactattcactctacccggtgttgcccatggccatcgccgcggatgccttgctcgctgtgtcgacgagcccgactccagagaacgccagcagttacacaatcaagattgccaatgtgcaggggtcaaaattccccgagcacgaattctctctggggttcgacgccgtcgacattgacgccaccgtccacgagtggactaactatttcaagtcgggcctgcgcggcgccctggagctgctacgcaagaagcacggagatgacttcaaacccaagagcatgaacatccttgtcgacggcactgttcctacgggtggcggtttgagctccagcgccgcctttgtcactgccagtgcccttgcggtcatgatagccaacggcgagcagactgttgacaagaccgagttgaccgagctggctatcgttagcgaacgggcagtcggcgtgaactctggcggaatggaccagtccgcctccgtcttctcggagcgcggttccgccctcttcgtctcattcagcccaaccctaaaggcgtgccccgttcagtttcccaagaccaacccagagctggtgtttctgatcgcccagtctttcgtcacctcggacaagttcgtcaccgggcccatccactacaacctccgcgtggtcgagtgctcgctcgcggcagcctatctcaatgccgtcctgaacccacccggcacccggctacctgccgatgccgcccctctgggcatcagccttcatgggtttcaagaaacctactttgccttgaaggagcgcgctgccggggccacgtcgagcaagtccgtgtccgagcagctccaggagctgctcaccctaacagaacagacgctcgacaagccggaaggttacacccgggaagagatcgccacggtgttgggaatcaccgtcgacgagctcaacgccaggttcacctcgcgcttccccgtccgcgccgagcgcttcaagttgcgccagcgcgcgcagcacgtctacagcgaagccttgcgcgtcctgcagttcctggacctcctcgagagcagcagctcgcccgccagcggcgaggacacagccgcctacaacgcccggctcggcgccctcctcaacgagactcaggcctcctgccgcgacgtctacgagtgcagctgcgccgagatcgacgacctgtgcgccatcgcccgccgcaacggcagctacggcagccgcctgaccggtgccggctggggcggctgcagcgtgcacctcgtgcccgctgacagggtagccgcggtgcgggaggcgtgggaaaccgagtactacagcaagctgcagctaagccaggagcagaaggaggcggccgtggtggtgagccgaccggggagcgggagcgcggtgttcctggtgaagggtggaaacttggtttga

SEQ ID NO: 3195 - protein, 525 aa, Myceliophthora thermophilia
MAGPVPIAHSLGDIYTSDALPSQTKRWNKLVSQFEAKYGHGPEFVSRSPGRVNIIGEHIDYSLYPVLPMAIAADALLAVSTSPTPENASSYTIKIANVQGSKFPEHEFSLGFDAVDIDATVHEWTNYFKSGLRGALELLRKKHGDDFKPKSMNILVDGTVPTGGGLSSSAAFVTASALAVMIANGEQTVDKTELTELAIVSERAVGVNSGGMDQSASVFSERGSALFVSFSPTLKACPVQFPKTNPELVFLIAQSFVTSDKFVTGPIHYNLRVVECSLAAAYLNAVLNPPGTRLPADAAPLGISLHGFQETYFALKERAAGATSSKSVSEQLQELLTLTEQTLDKPEGYTREEIATVLGITVDELNARFTSRFPVRAERFKLRQRAQHVYSEALRVLQFLDLLESSSSPASGEDTAAYNARLGALLNETQASCRDVYECSCAEIDDLCAIARRNGSYGSRLTGAGWGGCSVHLVPADRVAAVREAWETEYYSKLQLSQEQKEAAVVVSRPGSGSAVFLVKGGNLV

SEQ ID NO: 3196 - DNA, 1350 bp, Myceliophthora thermophilia
atgtctgctcccgcccacaagttcaaggttgccgacctttctctcgctgccttcgggcgcaaggagattgagctggccgagaatgaaatgcctggtctcatgtccatccgcaagaagtatgccgccgaccagccgctcaaaggtgctcgcatcgcgggctgtctgcacatgaccattcagaccgccgtcctcattgagaccctcgtcgcccttggtgccgaggtcacatggtcttcgtgcaacatttttagcacccaggaccacgccgcggctgccatcgccgcggctggcatccccgtcttcgcctggaagggcgagaccgaggaggagtacaattggtgcttggagcagcagcttgtcgccttcaaggacggcaagaagctcaacctaatcctggacgacggcggcgacctgacccacctggtgcacactaagtaccccgagatgctcaaggactgctacggcctgtccgaggagaccaccacgggtgtccaccacctctaccgcatgctcaagaagggcgagctactagttcctgccatcaatgtcaacgactctgtcaccaagtccaagtttgacaacctctatggctgccgcgagtcgctcattgacggcatcaagcgtgctactgacgttatgattgccggaaagatcgccgtcgttgccggtttcggtgacgtcggcaagggctgtgccgtctctctccgcgacatgggcgcccgtgtgctcatcaccgagattgaccccatcaatgccctccaagccgccatggctggctacgaggtaaccacgatggagaaagccagcaagatcggtcaaatctttgtcacgaccactggctgccgcgacatcttggttggtaggcattttgaggctatgcccaacgacgccattgtctgcaacattggccacttcgacgtggagatcgacgtcgcatggctcaaggccaacgcccagtctgtgcagaacatcaagccccaggtggaccgctacctgttgaagaacggccgccacatcatcctgctggccgagggccgccttgtcaacctgggctgtgccactggccacagctccttcgtcatgtcgtgcagcttcaccaaccaggtacttgctcaaatcttgctctacaagaacaacgacgaggagtttgccaagaagtacgtcgagttcggcaagatcggcaagctggagaagaaggtttatgtcctgcccaagatcctggacgaggaggttgcccgcctccacctggctcacgtcaacgttgagcttaccaccctgactgacgtccaggctgaatacctcggcctggatgtcgagggtccctacaagagtgaccactaccgctactaa

SEQ ID NO: 3197 - protein, 449 aa, Myceliophthora thermophilia
MSAPAHKFKVADLSLAAFGRKEIELAENEMPGLMSIRKKYAADQPLKGARIAGCLHMTIQTAVLIETLVALGAEVTWSSCNIFSTQDHAAAAIAAAGIPVFAWKGETEEEYNWCLEQQLVAFKDGKKLNLILDDGGDLTHLVHTKYPEMLKDCYGLSEETTTGVHHLYRMLKKGELLVPAINVNDSVTKSKFDNLYGCRESLIDGIKRATDVMIAGKIAVVAGFGDVGKGCAVSLRDMGARVLITEIDPINALQAAMAGYEVTTMEKASKIGQIFVTTTGCRDILVGRHFEAMPNDAIVCNIGHFDVEIDVAWLKANAQSVQNIKPQVDRYLLKNGRHIILLAEGRLVNLGCATGHSSFVMSCSFTNQVLAQILLYKNNDEEFAKKYVEFGKIGKLEKKVYVLPKILDEEVARLHLAHVNVELTTLTDVQAEYLGLDVEGPYKSDHYRY

SEQ ID NO: 3198 - DNA, 711 bp, Myceliophthora thermophilia
atggagcccattgtccacaccattttcgagccggagacttcgacgtggcagtacgttgtgaccgatctatccaccaaaactgcagtcatcctcgaccctgtcctcgacttcgatcctgcccgcccgcaacgccgtgaccaccgagacggccgacagcttgctggccctggtcggggagaccccctcccccaaccccaaaaagcccccccccccccccccccccatccaaacactcttactgaccagaacctccagccaacatttttttgcggcgactccatcttcaactgcgacgtcggttccgctcgctgcgacttccccggcggcaacgcgaaagacctcctcccgcccaacttcaaaatctacaccggccacgactacccgcccaacaccccacgctcgacgccccaggcgttctctaccgtggccgagcaaatggaacacaacaagcatttgagaaccggcacgtcagaagccgactttgtcagatggcggacggagcgcgacgcggcgctggccgagccccggctgattcaccaggcgttgcaggtgaacattcgcgcgggaaggctgccgcgcgacgggccggttgaaagattggtccccgttgcggttcttcccgtgcgcatcgccgccacgatcccacctcccccgcagttaaacgaaatgagcgtcccatctagaatgggcgcaactattgactcgtcgtga

SEQ ID NO: 3199 - protein, 236 aa, Myceliophthora thermophilia
MEPIVHTIFEPETSTWQYVVTDLSTKTAVILDPVLDFDPARPQRRDHRDGRQLAGPGRGDPLPQPQKAPPPPPPHPNTLTDQNLQPTFFCGDSIFNCDVGSARCDFPGGNAKDLLPPNFKIYTGHDYPPNTPRSTPQAFSTVAEQMEHNKHLRTGTSEADFVRWRTERDAALAEPRLIHQALQVNIRAGRLPRDGPVERLVPVAVLPVRIAATIPPPPQLNEMSVPSRMGATIDSS

SEQ ID NO: 3200 - DNA, 1905 bp, Myceliophthora thermophilia
atgtccgagccgccatcgtcccctcctcgagaaggaaccagcgtggaggatgccttggcctggtataagtcgcaatacgaagtgctggaggccgagctggccgaattccaagcctcgagcaaggaactagaggcagaactcgagaaggacctagatgcggccgacaagcgggaacgagcgctgcggcaaaaagcagaggggctgagctttgaagtggaagagtggaagaggaagtataaggagtccaaggcggaggcgaatgcggcgcagaatgctctcgagaaggagattacgaacctccgcgacgcaaacagaacgctccagctgaaactccgcgacatcgaggttgccaacgatgactttgaacgccaggcacgaaccaccacctcctccctggaagacctcgagtccaaatacaacgttgccatcgaaagggccgtcatgctcgaagaggaaatcaagattggggagcaagagcgagagcgactccgggtcgagtctcagaggctgaaggaggaacttgccgatcttaagatcgaagccgaaattctgcaggacaagctcaagaaacaggagtctcgccatctctcgagcatatcgaccgatatctcttcgattccaggctctccctcgttttgcaactcgccgcactcgaccgcgagctctccgatgatcatgactccgccagacctcaagtcgctgtccgcgacggacaccacctcggaactccaagacccgccatcacctcccatgtctgatgcctccctgccgctgcccaaaataagcgggctgaagacgcccgccgcccaacgaaagagcaggctgccctcggccgattctcacagtatcaccccaaagccacgggcgttcacggcttccacatcctcttcccgctccgctcgggtcgtcactacctccggtgccatgagaaccccggtccaccggtcgtcggccgcgaaacccacccgcacaccctctcacagagtcgcgccctccaactccctcgcccacattcggaccctcaccgcccagatgcaacggctggaagcccgcgtgcagtccgcccgctccaagcttcagggccccgccaacactcccccgcgctcctccccgcgaggccccatgaccgttccctcaaccgtcacgatccgcacccgcaagcgcgccactggctctacggcctcgtccagcgccaccagcctcgccggctccgagacgaccccctcccaatcccgccacgctccatccgattcccgcagcagcatctcttccagcgcgaccaagcacgttccccgacttagtgcatcgggcgtctcgcgcctttcctttggccccctccccaaccgcaacccaaccggcgcctcctcctccaacaactccaacaccaccggcaccaccaccgacttcgacttcaaccgcccccccagccgagccagccattcgagctacgcccgccccgcaagccgcaccgactcctacaatggcggctcgtcaggtacgactatgccgcctccgcggcccatgagccgcgccagcatgtccagtacccgcaccccgctcagcaggccgcgcagcagcctagggatgcgcaatggacacggccacggacacagcggaagcgtgagctatacgggcagcagtgccgtcatggcagaagaggcagatgagaacgggggagtcgccgtcgacggcaccgagtatcgcacccccagccggcgagggacgtacagtcggctggagatggaggcggccctggccggtggcgcggccggcggaagcgggatccccgtgccgacttctaggcggcagagtggtgggtcgacatcgacggggatctcgatttcgggcaggaggactagcggggctagttcgagagcgttgggagatctgggcgagacttactga

SEQ ID NO: 3201 - protein, 634 aa, Myceliophthora thermophilia
MSEPPSSPPREGTSVEDALAWYKSQYEVLEAELAEFQASSKELEAELEKDLDAADKRERALRQKAEGLSFEVEEWKRKYKESKAEANAAQNALEKEITNLRDANRTLQLKLRDIEVANDDFERQARTTTSSLEDLESKYNVAIERAVMLEEEIKIGEQERERLRVESQRLKEELADLKIEAEILQDKLKKQESRHLSSISTDISSIPGSPSFCNSPHSTASSPMIMTPPDLKSLSATDTTSELQDPPSPPMSDASLPLPKISGLKTPAAQRKSRLPSADSHSITPKPRAFTASTSSSRSARVVTTSGAMRTPVHRSSAAKPTRTPSHRVAPSNSLAHIRTLTAQMQRLEARVQSARSKLQGPANTPPRSSPRGPMTVPSTVTIRTRKRATGSTASSSATSLAGSETTPSQSRHAPSDSRSSISSSATKHVPRLSASGVSRLSFGPLPNRNPTGASSSNNSNTTGTTTDFDFNRPPSRASHSSYARPASRTDSYNGGSSGTTMPPPRPMSRASMSSTRTPLSRPRSSLGMRNGHGHGHSGSVSYTGSSAVMAEEADENGGVAVDGTEYRTPSRRGTYSRLEMEAALAGGAAGGSGIPVPTSRRQSGGSTSTGISISGRRTSGASSRALGDLGETY

SEQ ID NO: 3202 - DNA, 1860 bp, Myceliophthora thermophilia
atgatggtacaaacggctgcaggcgatgagattgcagcatcatcggattcgcagaccgacgtaaaagggagcaatggatcagagaacaaagggccacaaggagagccagtgttgggtgactgcatcgagtcactgatcgctcagtggcacacctgcatccaagagctgcagcgtctccagcaagcggccgaggaggcagacagaccggtgcggggactcggcgctctgctcaaggtgcagcagcgcgcgctggacaagaccatccagaggcaccgggggccgtcgccgtcgccgtcgcccatctcgcaggcccagtacttcggcatcaagagctgttgctgggacgacagatgggccgtcgtcaagaagtgccgcggcctggtcgccgtcaacaaggactttccccgcagcccgcggttgccggtggctgcggacgagggctggttggcctacaaggaccagcccttccaggagaagccggtggcggtggacgccgtcgtcgacagcggcgccacgtggatcaagttcatttccatttcacccaagaccctcgagtaccaggttgtggccgaagggtgggagagcgagccggaagaggagggcggcgagggcggcgctgaagggggcgacgcactgggccacaccgagtttgccgataccgtcagcaagatcgtccgggccgcccgatggaaccactgtcaccgggtgcacctcgtcctgccggggctctacgaggggaaatccgaacatgtcgacaggatgattcactacgtccgccacaagatggggggagaggacgtgtctgtgcaagttagctgtgccggcagccccttcctcagcgagccccctccgccgctggaagaagccgtcaccgcgctcatccaggaccgggatgcgctggtcggcgaggactgtgcccgcctgaccgcgacggtcaacctggatcccagcgctctggtcgcgctcgtcaccgacctccaccacgggccggtccccctgcagccggagtgccagcagaagatcatcacccggtcgatcctcgaccacgagaccgacaacaacgatctggtggcgcgccaggacattctcccgaccgtcctgtacccggccctgcgcggccggaagatggtgtgcacccgcgccgcggcggcctacttccgcaggctcatcggcgcgatatccacccattcggaggagacccgcgccgccttggtcctcccgcccgccgacgaagcatcgtcgccgccgccgtcgccatcgccgtcgccggcagccctccgcgagaagctccaggcctggtccgccgtcccggtgcccgacgacctgcagctccccgtcgaggtcgtgcccgacgtcgacctcgacgacgctgcccaactggcagcgtccggcgccctgccgcccatggcgctcggcgtggcccgcgacctctcgccgctcaaccgctccgtctactgctacggctgggcacaccgcctgaccaccgtcacgggccaccggggcatcgagcggcaggtccgcctggccgtggcgcggcactggacgcgcggtgacgaacgcgacgaggtcccgcccgacatctggcaccgccacctcggcggctacctgatccaccgcgacaagcccaaggactggcgggacatggtgcctcccggggaggggatcccgcccgagctgacgcggtggaccaatccgtggacgacctggggccggggcatcagcacgtacgggctgccggacaccaagacatgggaaggggtcgggcacggggacaagacggcttatgggcggagggtcggcggaaaacaggcgcgggcgaacgctgaggaggaaccacccgaggaacaggaacagtcataa

SEQ ID NO: 3203 - protein, 619 aa, Myceliophthora thermophilia
MMVQTAAGDEIAASSDSQTDVKGSNGSENKGPQGEPVLGDCIESLIAQWHTCIQELQRLQQAAEEADRPVRGLGALLKVQQRALDKTIQRHRGPSPSPSPISQAQYFGIKSCCWDDRWAVVKKCRGLVAVNKDFPRSPRLPVAADEGWLAYKDQPFQEKPVAVDAVVDSGATWIKFISISPKTLEYQVVAEGWESEPEEEGGEGGAEGGDALGHTEFADTVSKIVRAARWNHCHRVHLVLPGLYEGKSEHVDRMIHYVRHKMGGEDVSVQVSCAGSPFLSEPPPPLEEAVTALIQDRDALVGEDCARLTATVNLDPSALVALVTDLHHGPVPLQPECQQKIITRSILDHETDNNDLVARQDILPTVLYPALRGRKMVCTRAAAAYFRRLIGAISTHSEETRAALVLPPADEASSPPPSPSPSPAALREKLQAWSAVPVPDDLQLPVEVVPDVDLDDAAQLAASGALPPMALGVARDLSPLNRSVYCYGWAHRLTTVTGHRGIERQVRLAVARHWTRGDERDEVPPDIWHRHLGGYLIHRDKPKDWRDMVPPGEGIPPELTRWTNPWTTWGRGISTYGLPDTKTWEGVGHGDKTAYGRRVGGKQARANAEEEPPEEQEQS

SEQ ID NO: 3204 - DNA, 450 bp, Myceliophthora thermophilia
atggccaccgaagcgccccagatcgaggcccctggtgtcacccagacccagccggagcagcagcaacaagaacaacaacaacaacaacagccacaggagaccacccagaaggaccaacaggaccaaaccaccaccaacaacaacgagaagcccgacggggaagccggcgacgacgccgctgccgccgccggtgctgctgcgtcggcgccctcccagaagaagcccaacccgctcaagaaggtcaccaacgtcttgaaggccctcttcggctgcctgcgcaagccggcggtcgcggacgaacagcatcagaaggagcagaaggccggcgacgacgaggccaagaaggccggcgccagcagcagcgagaaaggcaacgacaacgaaaagccccagggcgagggtcagccggcggatggcgccactgccactgctggcgccgcgcaggcttga

SEQ ID NO: 3205 - protein, 149 aa, Myceliophthora thermophilia
MATEAPQIEAPGVTQTQPEQQQQEQQQQQQPQETTQKDQQDQTTTNNNEKPDGEAGDDAAAAAGAAASAPSQKKPNPLKKVTNVLKALFGCLRKPAVADEQHQKEQKAGDDEAKKAGASSSEKGNDNEKPQGEGQPADGATATAGAAQA

SEQ ID NO: 3206 - DNA, 300 bp, Myceliophthora thermophilia
atggcatccgtccgaactgctaccctccgcacgacgctgcgccctcttccccggcgactccctcgcatccagccggctcgagtccgactcttcagcaccggacccggctccggccaggggggaggcgtaggcgacaaagggacaaacaaattgtacaacaagggcggcacgaaccccaacaagaacttggtgtacctcggactcggcgcgctcggtctcgcgggtgtctacgccatgttcatagccaagccggagaaggcggccgagaaggctcaagggacttcgtcgtcggctcgttga

SEQ ID NO: 3207 - protein, 99 aa, Myceliophthora thermophilia
MASVRTATLRTTLRPLPRRLPRIQPARVRLFSTGPGSGQGGGVGDKGTNKLYNKGGTNPNKNLVYLGLGALGLAGVYAMFIAKPEKAAEKAQGTSSSAR

SEQ ID NO: 3208 - DNA, 945 bp, Myceliophthora thermophilia
atggcgtcgtctcccgagcgcgccgggacggaaggcgacggcgatcagaaacagggatccggggccatcacggtgaccttcttcacgacgggcaccgttcagatccggccgcagatgagaagccagccgatatcgaaccagtgggtcctcggccgacggctgcggtcctttttcgatcgcgggtggactgaccccttgcccatcggggtcttcctcgtctcccacccggacggcccgatcctcttcgacacgggcgagtcgccccgccgcaacgagccggggttcgttcccgggtggctgcccatcaacctgctcgcgcgcaccaccatctcgcgcgaagacggcgtcgtcgcccagctgcggtcgcgcggcatcgagccgtcggcgctccaggccgttgtcatcagccacctccacggcgaccacgcgggcgggctccaggagctggtcgccgccgcgccggacgtgcccgtctacgtgagccgggagcactgggactttgtgacgggcaccaactccctccatgccaagacccaggggttcgaccggagccactggcccgccaacttcaagccccggttcctcgagcccctgggggggccggtcgggccgtggaagcagtcggccaagatcacggcggacgggagggtgctggccgtggacacgccgggccacgtgcccggacacatctcggtcatcgttcagggcgacggcgacggcgggcgtggcacgacctatcttctggcgggtgacgccacgtacgggaccgattttctggaccgggaagaacccgacggcatcaacgacgaccccaagacggcgctcaagagcttgatgctcatcaaggagttcgcgcgcgagaccgagctggtggtgctgcccagccacgatgccgccgtggagcggctgctaaaggatcgggtcgtctataagcccaagccataa

SEQ ID NO: 3209 - protein, 314 aa, Myceliophthora thermophilia
MASSPERAGTEGDGDQKQGSGAITVTFFTTGTVQIRPQMRSQPISNQWVLGRRLRSFFDRGWTDPLPIGVFLVSHPDGPILFDTGESPRRNEPGFVPGWLPINLLARTTISREDGVVAQLRSRGIEPSALQAVVISHLHGDHAGGLQELVAAAPDVPVYVSREHWDFVTGTNSLHAKTQGFDRSHWPANFKPRFLEPLGGPVGPWKQSAKITADGRVLAVDTPGHVPGHISVIVQGDGDGGRGTTYLLAGDATYGTDFLDREEPDGINDDPKTALKSLMLIKEFARETELVVLPSHDAAVERLLKDRVVYKPKP

SEQ ID NO: 3210 - DNA, 837 bp, Myceliophthora thermophilia
atgtcatggaaaagggagaccgtccgattccgacacttttatgtgtcctatccggcggaacacatcatccaggtcaccatcaaccggcccgacaagctcaactgcatcgacaaggcgaccagccgcgagatcgcacaggtctgggaagaactcgaccgcgatgagacattgtgggtgggcatcatcacgggcgccgggcgggcgttttgcaccggggcggatctccacgcagagtggaacgacatgaacaaggcgggcgtggtcaacgacatggctgcgccggggctcgcgggactcccccggcgcgacggcaagaagcccatcattgcggccgtcaatggcatctgcatgggcggggggttcgagatggtggccaattgcgacctggtggtggccgcgtcgtcggccgtcttctccctgcccgaggtcaagcgaggcatcgtgccggtggcggggtgtctgccgcgcttgactcgcacgctggggttgcagcgcaccatggacctcgtgctaacgggccggacggtcgacgccaagacgctctacgagtgggggctcgtgacgcaggtggtggatgccgccggcgccgacggtgacaagcttgttgtgcgggctgccctcgaggttgcgcaagccatgtgccgaaacagcccggatgcgctcattgtcgggcggacgggggtgcgcatggcctgggaggagggcagtgtggagaaggcggtgtcggccttggagcgggaatggtatccacggctggtgcagggcgccaacttccgcgagggcatccaggcgtttgtggagaagaggagtcccaaatggcgggattctaagctgtga

SEQ ID NO: 3211 - protein, 278 aa, Myceliophthora thermophilia
MSWKRETVRFRHFYVSYPAEHIIQVTINRPDKLNCIDKATSREIAQVWEELDRDETLWVGIITGAGRAFCTGADLHAEWNDMNKAGVVNDMAAPGLAGLPRRDGKKPIIAAVNGICMGGGFEMVANCDLVVAASSAVFSLPEVKRGIVPVAGCLPRLTRTLGLQRTMDLVLTGRTVDAKTLYEWGLVTQVVDAAGADGDKLVVRAALEVAQAMCRNSPDALIVGRTGVRMAWEEGSVEKAVSALEREWYPRLVQGANFREGIQAFVEKRSPKWRDSKL

SEQ ID NO: 3212 - DNA, 132 bp, Myceliophthora thermophilia
atgagctcgcacttctccggggcaaaagccataccccgggcctcctcggccctcccaaaggctaggaggttagtatcgtcggcgaagcctatcaaactgaccgcggggctggcccggcggatggcctggtaa

SEQ ID NO: 3213 - protein, 43 aa, Myceliophthora thermophilia
MSSHFSGAKAIPRASSALPKARRLVSSAKPIKLTAGLARRMAW

SEQ ID NO: 3214 - DNA, 681 bp, Myceliophthora thermophilia
atggcttccgctacgcacacaaaggaccgcgatgctgagcccagagtcgaggccccaacccccaacccccaacccgaaaacgaacaggacttctcgcccctgcagaacgtgtgcgcgcacctcaacgccttccacgtctacgcgtccgaccccaggcgcttcgtcgagacgaaccactactgcggccacctgaccgaggacgtgtggcagtgcctgctgtacgacagtccctcgccgggggcgcgcctgattggcgtcgagtacatgatcaggccgcacctgtacgagagcctgccgcaggaggagcgccgcctctggcacagccacgtcttcgaggtcaagtcgggcatgctggtcatgccccggccctcctccgctctggtgccccaggcgctctgggagaaggccgagacggccgagatgggggaggtcgtgcagctgtacggcaaggtctaccacctctggcaggtcgaccgtggtgacaagctgccgctgggcgagccgcagctcatgacgagccttagcgccgccgaccagctgcccggcctggaagctgtcctggacgagcgggataagcggttcccgggatgcgactggcggaggaaacgggagattaggaaggacatcaaagagccacagatacatcccgacgccgactatacgtggaagaagaaggcatga

SEQ ID NO: 3215 - protein, 226 aa, Myceliophthora thermophilia
MASATHTKDRDAEPRVEAPTPNPQPENEQDFSPLQNVCAHLNAFHVYASDPRRFVETNHYCGHLTEDVWQCLLYDSPSPGARLIGVEYMIRPHLYESLPQEERRLWHSHVFEVKSGMLVMPRPSSALVPQALWEKAETAEMGEVVQLYGKVYHLWQVDRGDKLPLGEPQLMTSLSAADQLPGLEAVLDERDKRFPGCDWRRKREIRKDIKEPQIHPDADYTWKKKA

SEQ ID NO: 3216 - DNA, 759 bp, Myceliophthora thermophilia
atggcttccaacccccccggaagatgctgcaccgttggtgtcctgcatgagggcacgcccacgggcaagatggtccgcgtcgcgggcaagcacgacgcctacctcgcgaccccccccgccgataaggaacacaagggcgccggcatcctgatcatccccgatgtcatcggcatctggcagaatagcaagctcatcgcagaccaattcgctgccaacggctacctgacgctgctcctcgacgttttcgaaggcgatgcgctccaactgaaccgccccgccgggttcaacattatggagtggctgaccaagggatcggatggcaagaccccgcacaccaaggaagccgtggacccgatcgtcttggatggcatcaaggcgctcaaggaggaatacggcgtcacaaagctgggcgccgtgggctattgcttcggcgccaagtacgtcgtgagacactacaagaacggcatcgccgtcggctacgtcgcccacccgtcctttgtcgaggaagaggagcttgcggccatctcgggcccgctcgccatctcggccgccgagaccgacaccatcttcccctccgagaagcgccaccggtctgaggagattctcaaggaggttggccaaccctaccaaatcaacctcttctcgcaggtcgagcacggtttcgccgtccgttgcgacccgtctatcaaggtgcagaagtttgccaaggagcaggcctttttgcaggcagtcacctggttcaacgagtatctcctgtga

SEQ ID NO: 3217 - protein, 252 aa, Myceliophthora thermophilia
MASNPPGRCCTVGVLHEGTPTGKMVRVAGKHDAYLATPPADKEHKGAGILIIPDVIGIWQNSKLIADQFAANGYLTLLLDVFEGDALQLNRPAGFNIMEWLTKGSDGKTPHTKEAVDPIVLDGIKALKEEYGVTKLGAVGYCFGAKYVVRHYKNGIAVGYVAHPSFVEEEELAAISGPLAISAAETDTIFPSEKRHRSEEILKEVGQPYQINLFSQVEHGFAVRCDPSIKVQKFAKEQAFLQAVTWFNEYLL

SEQ ID NO: 3218 - DNA, 1068 bp, Myceliophthora thermophilia
atggcccaaaacgcacccaagggcaccattgccattgaggaagccgtgctaaaccccgcaggcctgtcatggatcgctgagtcggcgcccttgttcgaccccggccaagcccggtccccctcctcttcgtccccggataatacatatgtccagaggctgaatgatctgctcatcgacgttcatggcgagcgactggcccagatggacgcccacggcgtcgagtacatgcttctgagcctcacctcccccggagcgcagggggaacctgacccggccaaggcgcgggcgctcgcggccgaggcgaacgactggctggcggcgcaggtgtcccagaacccgcggcgattcggcgcgtttgctgccgtgtcgatgcataacgcggcagatgctgtggccgaggcgacccgggcggtcaagcagctgggcatgttcggcatcatgctgaacgactaccaggtggtgaacgaagggggtaatgccgagggcaagaagtactatgacgaggtcgactaccgtcccttctggaaggcggtcgaggagctcggcgtgcccgtgtacctgcacccgcgctaccccccggccaaggacctgcagccggggaccaagttgggggacagaaaacacatcctgggcgcggcggtgcagttccatctggatctcagccttcacctgtacgctctttgctctagcggcgtgtttgacgagtttccgaagttgcaggtcgtggtcggacatctgggcgaggggatccccttcaacctgtggcgtgcagaccactggtacaacaagccagtcaagaaagccacgaggccgtccaagcaagactacagctattatttccgccacaacatctccatcaccacctcgggcaacttcaacactcctgccctcaagtattgcattggccagatcgggcccgaacgctgtctcttttccatcgactacccctacgatagcatcgcggaagctcagcagtggtggctcgctcttgatctgcccgaggaccaaaagaggctagtggcacgagagaacgccattaggttgttcaagctcccgctcgagatttag

SEQ ID NO: 3219 - protein, 355 aa, Myceliophthora thermophilia
MAQNAPKGTIAIEEAVLNPAGLSWIAESAPLFDPGQARSPSSSSPDNTYVQRLNDLLIDVHGERLAQMDAHGVEYMLLSLTSPGAQGEPDPAKARALAAEANDWLAAQVSQNPRRFGAFAAVSMHNAADAVAEATRAVKQLGMFGIMLNDYQVVNEGGNAEGKKYYDEVDYRPFWKAVEELGVPVYLHPRYPPAKDLQPGTKLGDRKHILGAAVQFHLDLSLHLYALCSSGVFDEFPKLQVVVGHLGEGIPFNLWRADHWYNKPVKKATRPSKQDYSYYFRHNISITTSGNFNTPALKYCIGQIGPERCLFSIDYPYDSIAEAQQWWLALDLPEDQKRLVARENAIRLFKLPLEI

SEQ ID NO: 3220 - DNA, 975 bp, Myceliophthora thermophilia
atgagcgagagcgaagcaaacgcggaggcactcgtgccgaaattcaaattcgagcggctgctcaaccaagaccaagcgggtcgccggtcgtctatgctcggcaccatcgacggccagccggcgctgttgatcctcgagcgcgcgccgttcccaagttcggccgactacctcggttcggtgccagccagcctccgcgccatcaggaacctcggcgccaacgacatctaccactggtacttggccaacagcggtcccgtcagcggcgccgacagccacgagttcgccgacctcaagatcaacctcatctggccgtgcacagaaaagcacatcaagaaatacagcaggcagggggtgcgcttcgtcaccgagacgcccgagatctaccgcgaccacgtccgaccgtatatgcaagcgcagcgagaggcgggccggctgaactgggcattcaacatcatcgagggccgcaaggaggccgaggacgtcatctaccgcacgccctatggcgaggacccggaggaagggttcctcctgctgcccgacctcaactgggaccgcaagacgctcgacgcgctgcacctgctcgggctggtggagcggcgcgacctctggagcctgcgcgacctgcgaaagaagcacctcccttggctgcgccacatgaaggccaagttcctcgatgccaccaccagcgtgtacccatctatcgagcgcgaccagctcaagctctacctccactaccagccgacctactaccacctgcacatccacatcgtccacgtcgccctcgaggccggcgccacccaggccacgggtaaggccgtcgggctcgagagcatcatgtcccagctcgagaccatggctggggacgacgaagaagcgggcatggattccgtcacgctctgctacaccctcggcgaggccagcgacctgtgggtggacgtgttcgagccgctcaagaggacgaatacagcttcctga

SEQ ID NO: 3221 - protein, 324 aa, Myceliophthora thermophilia
MSESEANAEALVPKFKFERLLNQDQAGRRSSMLGTIDGQPALLILERAPFPSSADYLGSVPASLRAIRNLGANDIYHWYLANSGPVSGADSHEFADLKINLIWPCTEKHIKKYSRQGVRFVTETPEIYRDHVRPYMQAQREAGRLNWAFNIIEGRKEAEDVIYRTPYGEDPEEGFLLLPDLNWDRKTLDALHLLGLVERRDLWSLRDLRKKHLPWLRHMKAKFLDATTSVYPSIERDQLKLYLHYQPTYYHLHIHIVHVALEAGATQATGKAVGLESIMSQLETMAGDDEEAGMDSVTLCYTLGEASDLWVDVFEPLKRTNTAS

SEQ ID NO: 3222 - DNA, 1422 bp, Myceliophthora thermophilia
atgaccgacacgtcaagcaacagtagcgtgtccgagatcgaagactccgacctcgacggcagcagcgtttgtggaggacagcgcttaccgatcttcggcagaaaagacgaactcaagccccaaagcaccgccaccactaggcagctgcgacggcacgatccatccgatcgtgttgattataatgtcgaaaaccactacctcgcgctagaggctgctctggagcccgcgaacgatgaggaggagcggccatcaatcaagagggagcacagacaggacacgatacggatgggatcattgaaacggggcgcctggcagcccgcagcatcgaagaatctaggaaattcgaataagaggagaaaacgcgcagatgtccctcaagacaagccggaggacggtcaaaaaaaagatagagatgagggtgctcaggaccgcgctggtgaatcccgagcggtcgtggtcctggactgcgcaggaccgcgcttctcttcagcgccactgcagcacacaccgaccagagctcatgctctgggaactcgtcctcgcatcttcaacaggtcgctacccgacctgttcacgtacggtctgaagctcgatgactctgtgttgccggacatcaatgtcgacgggcaagcgctccccaatccgggcttcctctccaccgccatctccgataatcttcagctgttggtctgccacccggtctgggagggcagcctctcgctcgttcgttacgctctccaggtcgccgtcatgcacagagttccgggtcatatcttcccgatcgcaccgctgcccaacttgacgtcgcgggtcaccgtgatgaggaatccaagccttgcaggccacccgatgctggcccgggatttcgactttgcgagctacgagatgagccatccctgcgcgagacccatgatccagcaactgtgtgacattcttgaggagagcgtggaaaaagaagatttccacgaagccgatgccggtttccgcgagaagaccctgttcctcctccgagtccaagacatccaagcggtcatcaactccaccaaccgactcgcagtaaacggcatgccagttttccgaacgtgccacgactacttcctacaccacaagtcccttgctcaagctgaaagggatcaccgagcctcgatcgacgagctggaggcgctgaagcggcacaagaaagaatgggtgctcgccacgcggcgcaagtggatcgtgtcctcgaggcactggcgacaggaaagcacgggcgtggcccccccggctgaggacgagccgggagcgtacgacatgcccgagggcgacgcctgtcccgcccatctctactgtgagcagctcggcaggagcgaggcccacttggcgctgatgcgcggtaccatctggccgctgatcaagacgcctcctccagtgttcggtttgtag

SEQ ID NO: 3223 - protein, 473 aa, Myceliophthora thermophilia
MTDTSSNSSVSEIEDSDLDGSSVCGGQRLPIFGRKDELKPQSTATTRQLRRHDPSDRVDYNVENHYLALEAALEPANDEEERPSIKREHRQDTIRMGSLKRGAWQPAASKNLGNSNKRRKRADVPQDKPEDGQKKDRDEGAQDRAGESRAVVVLDCAGPRFSSAPLQHTPTRAHALGTRPRIFNRSLPDLFTYGLKLDDSVLPDINVDGQALPNPGFLSTAISDNLQLLVCHPVWEGSLSLVRYALQVAVMHRVPGHIFPIAPLPNLTSRVTVMRNPSLAGHPMLARDFDFASYEMSHPCARPMIQQLCDILEESVEKEDFHEADAGFREKTLFLLRVQDIQAVINSTNRLAVNGMPVFRTCHDYFLHHKSLAQAERDHRASIDELEALKRHKKEWVLATRRKWIVSSRHWRQESTGVAPPAEDEPGAYDMPEGDACPAHLYCEQLGRSEAHLALMRGTIWPLIKTPPPVFGL

SEQ ID NO: 3224 - DNA, 1038 bp, Myceliophthora thermophilia
atggttcagaacggaggtgacctcgacctcgacatcgacatggctaccaacgcccgaattaaggaactcgagaacggcaaaaagtactcgcagaaactggtcaacgaggcttacgccaaaatcgaagcgctcgagactgccaaagcgagccgcatcaagatcgaaccacctggcaaatacggaggaaccaaggaggatctcgcaggattcctgacaaaccttcgatcctactttcggcttaataacgacaagtttccggacgacaaagccaaagttctctacgcagtcttccgatcttacgaccgtttcgaagaagagcttcggaaggtttttagcgacaaagacgagaagattcatacgcaagaaagactcgccaacctccaacagaccaagtcagcagcctcttacgccgcacagttcagacaggacatgctcaagtctcagcttaacgacgaggcgttgatgcaactgttttacaacggcttgaaggaaaaggtcaaagacgagctatacaagtacaaccggcctgagaccctagacgaatacatcgcacaggccattaggatcgatgatcgactctacacacgagagcagcagaaacgaggtcagataaacggaaccgcggttaaggccaacgacaagaaaaagcgagcgtacgtcagtacctcgtacgggacgcaccccggagccatagatgtagacgtagcacagaagcaggacaagaagaagacggcccaagacaagtccaacgaaattacggccatcaacgaaaccaccaaggacgttatcgaagtagcggccacgagctacgaagacaggggcaacgacacggacagtcttagacatgacgacaatagagaagacgaacaagcaccgtactccgaactggtcactgtggacccagagacaggtctcgccgaatgggacgtggcaggagaatatgcaccgccagaacgaatcgaatggtatcgtaacgaagttttccggctcaatacggaactgcgcgaacgggatggacgcttgattcgactcgcctag

SEQ ID NO: 3225 - protein, 345 aa, Myceliophthora thermophilia
MVQNGGDLDLDIDMATNARIKELENGKKYSQKLVNEAYAKIEALETAKASRIKIEPPGKYGGTKEDLAGFLTNLRSYFRLNNDKFPDDKAKVLYAVFRSYDRFEEELRKVFSDKDEKIHTQERLANLQQTKSAASYAAQFRQDMLKSQLNDEALMQLFYNGLKEKVKDELYKYNRPETLDEYIAQAIRIDDRLYTREQQKRGQINGTAVKANDKKKRAYVSTSYGTHPGAIDVDVAQKQDKKKTAQDKSNEITAINETTKDVIEVAATSYEDRGNDTDSLRHDDNREDEQAPYSELVTVDPETGLAEWDVAGEYAPPERIEWYRNEVFRLNTELRERDGRLIRLA

SEQ ID NO: 3226 - DNA, 387 bp, Myceliophthora thermophilia
atgtatgggcccaaccacgccaagccagatctttccgcccaagctcccccactaagccaggttccagagccccgacatgcgttggtcagggcagctcgagcccgaaggtgcatgtgtcttgcgaatattggctgccacggccgcccgcagcgcgtggacgaatggcatcgtgcgaacagcaagctttttgcgcataccggcattgagtccccaggcggcggtcccgtcaattccaccggggcacctacactactgcggtgcacagcagcccacggcagcccacagcagcccacagcagagcacacacacctcaccctacactacaggtgcagcaacggattccactccatcatccccccccgaccccaagttcccccggccatctga

SEQ ID NO: 3227 - protein, 128 aa, Myceliophthora thermophilia
MYGPNHAKPDLSAQAPPLSQVPEPRHALVRAARARRCMCLANIGCHGRPQRVDEWHRANSKLFAHTGIESPGGGPVNSTGAPTLLRCTAAHGSPQQPTAEHTHLTLHYRCSNGFHSIIPPRPQVPPAI

SEQ ID NO: 3228 - DNA, 270 bp, Myceliophthora thermophilia
atgtccgataggggattcacctacaagggctctggtgtcaatagccagggcaaccactggtgttcccgtgattatggcaacgggtcgaactcgtatcactactcgaaccaggacgggagctactactacgccaatccggacggctcaacctactattccgacggcaagggcggctccacgtacacttcgccgtctggctacaaggtgtactcgaccggcttcgtctcgggtccctcgtcgaacgactcgggcagcggcagaagcaagtaa

SEQ ID NO: 3229 - protein, 89 aa, Myceliophthora thermophilia
MSDRGFTYKGSGVNSQGNHWCSRDYGNGSNSYHYSNQDGSYYYANPDGSTYYSDGKGGSTYTSPSGYKVYSTGFVSGPSSNDSGSGRSK

SEQ ID NO: 3230 - DNA, 3759 bp, Myceliophthora thermophilia
atgccaaagacaaccatcgaccatagcgccgtcaccggatcgccgaccaagaaccggcggaacgtcgctgacagcgcccccggatcgcagggtatcactcgacgcgcaaaagacaaggccgcccgggccgaacgcgctgctggcggcggcggccaggccgcgccgagcaagcccaagaaggccactttcgacacgacaaagaagaaggagatcggcgtgtccgacctgacgctactacggaccgtgtccaacgacgccatcaacgagaacctgaagaagcggttcgagggcggcgaaatctacacatacattggccatgtactggtctcggtcaacccctttcgcgacctcggcatctacaccgaccaggtcctccagagctaccgggggaagaaccggctcgagatgcccccgcacgtcttcgccatcgccgagtccgcctactacaacatgaaggcgtacaaagacaaccagtgcgtcatcatctcgggcgagtccggtgccggcaagaccgaggcggcaaagcgcatcatgcagtacatcgccaacgtctcgggcggcggcgacacgggcgacatccagcagatcaaggacatggtgctggcgaccaaccccttgctcgagtcgttcggcaacgcaaagacgctgcggaacaacaactcgtcgcgcttcggcaagtatctgcagatccacttcaacgcccagggcgagcccgtcggtgccgacatcaccaactacctgctcgagaagtcgcgcgtggttggccaggtcaccaacgagcgcaacttccacatcttctatcagttcacgaagggcgcgtcgcagcattaccgagagatcttcggggtccagaagcccgagacgtatctctacaccagcaagtccaagtgcttcaacgtcgacgggatcgacgacctggccgagttccaagacacgctcaacgccatgaagatcatcggccttacgcaagccgagcaggacagcatcttccgcatgttggccgccatcctctggaccggcaacctggtgttccgcgaggatgacagcggatatgcggccgtgtcggaccagtcggtcgtggacttcctcgcctatctgctcgaggtcgacccggccagcctcgtccacgccatcacgatccgcgtcctcacgccgaggagcggcgaggtgatcgagtcccccgcgaacgtggcccaggcgacggcgaccagggacgccctggccatggccatctactaccacctgttcgactggatcgtggagcggctcaaccagtccctaagggcgcggcaggccacctccaacacgattggcattctcgacatctacggcttcgagatcttcgagaagaacagcttcgagcagctctgcatcaactacgtgaacgagaagctccagcagatcttcatccagctgaccctgaaggccgagcaggaagaatacgcccgggagcagatcaagtggacccccatctcctacttcgacaacaagattgtgtgcgacctgatcgagtccgtccggccgccgggcatcttctcggccatgaaggatgccaccaagaccgcccacgcggatcccgccgcctgcgaccgcaccttcatgcagagcatcaacagcatgtcgaacccccacctcacccctcggcaggggagcttcatcgtcaagcactacgccggcgacgtcacgtacacggtcgacggcatcacggacaagaacaaggaccagctcctcaaggggctcctcaacctggtccagggcagccagaacaagttcctccacaccatcttccccgtccacgtggaccaagataaccggaagcagcccccctcggcgggcgacaggatcaaggcgtcggccaacgcgctcgtggacacgctcatgaagtgccagccttcctacatccggaccatcaagcccaacgagaacaagtcgccgcacgagtacaacgtggccaacgtgctccaccagatcaagtacctgggtctccaggagaacgtgcggatcaggcgcgccggcttcgcctaccgccagtcgttcgagaagttcgtcgaccgcttcttcctgctgtcccccgcgacctcgtacgcgggcgagtacacctggcagggctcctacgaggccgccgtcaagcagatcctcaaggacacgagcattccccaggaggagtggcagctcggcgtcaccaaggccttcatcaagtcgcccgagaccctgttcgcgctcgagcacatgagggaccggtactggcacaacatggcgacgcggatccagcgcatgtggcgggcctacctcgcctaccgggccgaggccgccacccgcatccagcgcttctggaggaagaagcgcaccggcgccgagtacctccagctccgcgaggagggccacaagatcctgcagggccgcaaggagcgcaggaggatgagcctcctcggctcccggcgcttcctcggcgactacctcggcatcaacgcgaccaccggcccgggcgcccaggtgcggaacggcatccatctcggctccaacgagagggccgtcttctcctgccgcggcgagatcctcgaggccaagtttggccgctccagcaagccgagccccaggatcctgatcgtcaccaacagcaagttctacatcgtcgcgcaggtcatgggccagaacggccaggtccagatcgtggctgagcgcgcgatccccctgggcgccatcaagttcatcggcacgtccacgtgccgggacgactggttctccctgggcgtggggtcgcagcaggaggccgacccgctgctcaactgcgtcctcaagacggagctgttcacgcagatgaagagagtgatgccgggcgggttcaatctgaagattggggatacgattgagtacgctaagaagccgggtaagatgcagatcgtaaaggtcctcaaggacgcgcccggcccgcaggacttctacaagagcggcgccgtccacacgcagcaaggcgagccgcccaactccgtctcccggccgacgccaaagggcaagccggtccctccgagaccgatcaccaagggcaagttgatcaagcccggcgggccgggcggcagaccgtccaggaaccctgtcaaccgaacgccccagccccgaccgtcggccgcttccgccgcgaccagcaacaccaccactacggcaacctcgaggccggtcccgcaaccccagccggcggtctccgtcagcatcccctcgcacacccgccaaaagtccaactcatcggccgtgcgcgcacctccccctccaccccccgctgcgcctgcaaagcccaagatcatggccaaggttctctacgacttcaccggtcagcgagacaatgaactgtccgtcaaggcgggccagataatcgagattgtccagaaggaaaacaatggctggtggctcgccaagacgtcgagcggacaagcctgggttccggccgcgtacgtggaggaacaagagccggccccggccccggcaccggtaccgcgaccaccaccgcccctgccggcggccgccgccgcgaacggggtggcggcgcgggccaagccggcagcgccgcagcccccggccaagcgcccggtggcgggcaggaaaccggccggcctgcaggcgcgcgactcgggcatgagcatgaacggctcggacagcagcaggagcagcacgcctacgccgagcctggccgggagcctggcggacgcgctgctggcgaggaagaacgccatggcgaagaaggatgatgatgatgacgactggtag

SEQ ID NO: 3231 - protein, 1252 aa, Myceliophthora thermophilia
MPKTTIDHSAVTGSPTKNRRNVADSAPGSQGITRRAKDKAARAERAAGGGGQAAPSKPKKATFDTTKKKEIGVSDLTLLRTVSNDAINENLKKRFEGGEIYTYIGHVLVSVNPFRDLGIYTDQVLQSYRGKNRLEMPPHVFAIAESAYYNMKAYKDNQCVIISGESGAGKTEAAKRIMQYIANVSGGGDTGDIQQIKDMVLATNPLLESFGNAKTLRNNNSSRFGKYLQIHFNAQGEPVGADITNYLLEKSRVVGQVTNERNFHIFYQFTKGASQHYREIFGVQKPETYLYTSKSKCFNVDGIDDLAEFQDTLNAMKIIGLTQAEQDSIFRMLAAILWTGNLVFREDDSGYAAVSDQSVVDFLAYLLEVDPASLVHAITIRVLTPRSGEVIESPANVAQATATRDALAMAIYYHLFDWIVERLNQSLRARQATSNTIGILDIYGFEIFEKNSFEQLCINYVNEKLQQIFIQLTLKAEQEEYAREQIKWTPISYFDNKIVCDLIESVRPPGIFSAMKDATKTAHADPAACDRTFMQSINSMSNPHLTPRQGSFIVKHYAGDVTYTVDGITDKNKDQLLKGLLNLVQGSQNKFLHTIFPVHVDQDNRKQPPSAGDRIKASANALVDTLMKCQPSYIRTIKPNENKSPHEYNVANVLHQIKYLGLQENVRIRRAGFAYRQSFEKFVDRFFLLSPATSYAGEYTWQGSYEAAVKQILKDTSIPQEEWQLGVTKAFIKSPETLFALEHMRDRYWHNMATRIQRMWRAYLAYRAEAATRIQRFWRKKRTGAEYLQLREEGHKILQGRKERRRMSLLGSRRFLGDYLGINATTGPGAQVRNGIHLGSNERAVFSCRGEILEAKFGRSSKPSPRILIVTNSKFYIVAQVMGQNGQVQIVAERAIPLGAIKFIGTSTCRDDWFSLGVGSQQEADPLLNCVLKTELFTQMKRVMPGGFNLKIGDTIEYAKKPGKMQIVKVLKDAPGPQDFYKSGAVHTQQGEPPNSVSRPTPKGKPVPPRPITKGKLIKPGGPGGRPSRNPVNRTPQPRPSAASAATSNTTTTATSRPVPQPQPAVSVSIPSHTRQKSNSSAVRAPPPPPPAAPAKPKIMAKVLYDFTGQRDNELSVKAGQIIEIVQKENNGWWLAKTSSGQAWVPAAYVEEQEPAPAPAPVPRPPPPLPAAAAANGVAARAKPAAPQPPAKRPVAGRKPAGLQARDSGMSMNGSDSSRSSTPTPSLAGSLADALLARKNAMAKKDDDDDDW

SEQ ID NO: 3232 - DNA, 1479 bp, Myceliophthora thermophilia
atggcttcagtccagaatgccccgcaggagccaacagcgcagcagctgtccgagctcaaggagaagtacacgctcgccggacagagccaagtgttcaccttttacgactcgctctcgagcgccgagaaggctgcactataccagcaactgagccagttcgaccccacgtacatcaacaccatcgccgccaaagcacttgccccaccccaagcccaggatgccgcgccgtctctcgagccgctgccggacttggcccgcgcgagcatcatggactcggcgcccgccgacattgaccgctggtactcgcagggtctcgacctgatcgcagccaacaaggtcgccgtcgtgctcatggcgggcggccagggcacccggttgggcagctccgagcccaagggctgcttcgacatcggtctgccatccgccaagtccctgttccagatccaggccgagcgcatccgcaaagtcgaacagcttgccgccaagaaggccggcaccggcgccggggtcacggtcccctggtacgtcatgacgtccgggccgactcgcggccctaccgagcggttcttcaaggagcacaactactttggcctcaagcccgagaacgtcttcatcttcgagcagggcgtcctcccttgcatctccaacgacggcaagatcctgctcgagagcaaggccaaggtggcggttgcgcccgacggcaacggcgggctctacaacgccctcgtcgaggccaaggtgctggacgacatgaagaggcgcggcatcgagcacatccacgcctactgcgtggacaactgcctcgtcaaggtggccgatcccgtcttcatcggcttctcggcctctgcggacgtcgacatcgccaccaaggtcgtgcgcaagcgcaacgcgaccgagagcgtcggcctgatcgtcagcaagaacggccggccagacgtggtcgagtatagcgagatcgacccgcagatcgccgccgaggaggacccccagcagcccggcgtgctcaagttccgcgccgccaacattgtcaaccactactactcgttccgcttcctcgagagcatccccacctgggtcaagacgctgccgcaccacgtcgcccgcaagaagatcccctacgccgatctcgagtcgggcgagacgatcaagccggccaagcccaacggcatcaagctggagcagttcgtgtttgacgtcttccccaagctggagctgagcaagttcgcctgcctggaggtccgccgcgaggacgagttcagcccgctcaagaacgcccgcggcaccggcgaggacgacccggacaccagcaagcacgacatcatggcccagggcaagcgctggatgcaggcggcgggcgctaccgtggtcagcgaggacccgaacgcgggcgtcgaagtgagcccgttgttgagctacggcggcgaaggtctcgagagcgttactggcaagaccatcacggcgcctacactcttggaatga

SEQ ID NO: 3233 - protein, 492 aa, Myceliophthora thermophilia
MASVQNAPQEPTAQQLSELKEKYTLAGQSQVFTFYDSLSSAEKAALYQQLSQFDPTYINTIAAKALAPPQAQDAAPSLEPLPDLARASIMDSAPADIDRWYSQGLDLIAANKVAVVLMAGGQGTRLGSSEPKGCFDIGLPSAKSLFQIQAERIRKVEQLAAKKAGTGAGVTVPWYVMTSGPTRGPTERFFKEHNYFGLKPENVFIFEQGVLPCISNDGKILLESKAKVAVAPDGNGGLYNALVEAKVLDDMKRRGIEHIHAYCVDNCLVKVADPVFIGFSASADVDIATKVVRKRNATESVGLIVSKNGRPDVVEYSEIDPQIAAEEDPQQPGVLKFRAANIVNHYYSFRFLESIPTWVKTLPHHVARKKIPYADLESGETIKPAKPNGIKLEQFVFDVFPKLELSKFACLEVRREDEFSPLKNARGTGEDDPDTSKHDIMAQGKRWMQAAGATVVSEDPNAGVEVSPLLSYGGEGLESVTGKTITAPTLLE

SEQ ID NO: 3234 - DNA, 1431 bp, Myceliophthora thermophilia
atgaatctcctcctttccgacgactacctcctccaagactacccagagaacatcacaaacacgatccggtccggacactcgacatgcgtccgattcaaccgcaagggcgactttctggcctcgggccgcgtcgacggcaccgtcgtcatctgggatctcgagaccatgggcgtggcgcgcaagcttagaggtcattccaagaatatcacgtcgcttagctggtctcggtgcgggcgttatctgctttcggcgtgtcaagggtggaaggtcatcctctgggacctgcaggacgggaaacgctatcgcgaggtgcgcttccgcgctccagtctatggagccgagctgcacccatggaaccaccaccagtttgccgccgccctcttcgaggaccaaccgatgctcgtcgatatcacggaaccggtcgaagtgcgatatgtcctgccctcggtgccaaaacgaaccagcaccgagaccgacccggcgctgcgggagaaacaagccaaggaggatgcgaagcacatgacgacagccatcgtgtacacggcatcaggcgaccatttgctggccggcaccaccaaagggcgcctcaacatcatcgacgccaggacgcgcgagatcatctactcggaaaagattgcgagcggcatcatcacgacgctgcggctgaccgagtccggcagggagctcctcgtcaacgcgcaggaccggatcatacggaccttcatcgtgccgaacctctcggcggccgacctggacccggacacgatccagttaccgctcgagcacaagttccaggacgtggtcaacaggctgtcgtggaaccacgtggccttcagcgcgacgggcgagtacgtggccgcgtccacctacaacaaccacgaactctacatctgggagcgcggccacggcagcctggtgcgcatgctcgagggtcccaaggaggagcagggcgtcatcgagtggcacccccaccgcgccctgctggccgcctgcgggctcgagaccgggcggatcaacatctggtccgtcacgaccccgcagcgctggtccgccctggcgcccgacttcgtcgaggtggaggagaacgtcgagtacatcgagagggaggacgagttcgacatccacccgcaggaggagatccagaagcggcggctcgaccaggaagacgaggaagtcgacgtcctgacggtggagaacggcggcgggatggacgaggacctgggcgccttccgcatgcccatcctgttcaacctgggcgagtcggacagcgaggaagagttcgtcaacgtctcgctcgggacgctgcgcagaaagagcccaggcgaccaggacgaaggggacatgacgggcgaggagcgaggctcggggaagagaggcggcggcggcggcggcggtggtggttcaggccggggacgaggtaggaagaagtaa

SEQ ID NO: 3235 - protein, 476 aa, Myceliophthora thermophilia
MNLLLSDDYLLQDYPENITNTIRSGHSTCVRFNRKGDFLASGRVDGTVVIWDLETMGVARKLRGHSKNITSLSWSRCGRYLLSACQGWKVILWDLQDGKRYREVRFRAPVYGAELHPWNHHQFAAALFEDQPMLVDITEPVEVRYVLPSVPKRTSTETDPALREKQAKEDAKHMTTAIVYTASGDHLLAGTTKGRLNIIDARTREIIYSEKIASGIITTLRLTESGRELLVNAQDRIIRTFIVPNLSAADLDPDTIQLPLEHKFQDVVNRLSWNHVAFSATGEYVAASTYNNHELYIWERGHGSLVRMLEGPKEEQGVIEWHPHRALLAACGLETGRINIWSVTTPQRWSALAPDFVEVEENVEYIEREDEFDIHPQEEIQKRRLDQEDEEVDVLTVENGGGMDEDLGAFRMPILFNLGESDSEEEFVNVSLGTLRRKSPGDQDEGDMTGEERGSGKRGGGGGGGGGSGRGRGRKK

SEQ ID NO: 3236 - DNA, 4053 bp, Myceliophthora thermophilia
atggccggcgaggattcgagcagtcgtccgccgtacggttccccagatgcatcgaggacacaatggctgggagtcccggccgaagcagatatcccccgaatacaccaggggttgcgcattgcagttgacgcgggatttgtcaagttcctgatggactatgccgccaacaacaacaacagcgatgagtgtccgcccctgttcaaggcgtacctcgaagaggtggtgctcaggccaggggccgaggacctcagactgcaggtcgagagccacctgcggaacccacgcatcagagacttcggcctcggcccggtcttcctccgcgagcttgagaggtacagcatcttcgaccaggtatttcctccggtgcctggacggcggcctgccctaccgagcgctccgattcccgaaccgtaccggcccctggctcctaccccgggacggctcgccgagactgcctccgagccgcccgagctcgtcgagccgggcctccgcgagggtggcggcgaggagacagactccggagacgacgagcgagagagagccgcaatgatggaacgcctgcaagccctcgaacaggggcgtgcgcctccgcatcggaaccttaacgctccggccgctcccctcccaggcccaggcgttgtgtccgttcctcctcctatcccttcgaggagcgccttcggtgagcaaggcaggggcggacaagacacggggaggcttgccgcattgctccgtcggctccagtccatccctgtcctgtctcgggctggcgactttcgggaacagggagacgaggcgatgggcagccgccgcgactgggaagcagactcctggtacaagggcaagcgacagcccccattggcggtccggctcgacaccgtggtcaagttcctcgccgaggaagacgtggaccggtgtctgaactgggaggccagattcggtgaggttgtgtcctacctggaatggctcgctctcggcgacggcagccatcaactgcaggccgcccacccgcagacccgggccacgttcaacgacgccgtcaccaaggcaaaggcccacgtgctgttcgagaaacatcactacgagcccacgccccccttgacgatgatgatgatgacgaagatcgccaagccgccaccgaggcaccaccccctgagatcgacgcgccttgactggatggtcgacccgcgccgccggcccctcccgtcctggaccgcggcggtggtgcctgaccgcagcgagctcctcccgagggcgatcgtcccgcggcccccggttcccgtcaacaggatgctggtcgacagacccggagaccgtgccttgtacgaccgattcgccgaggacgagagaaggtggtggcgccgcgtagccggcagaaacggcccggacgacatcccccgcgacgacggaggagccaaggatgccgcggccgagcggcagaacctcgcctacatcgaggaacaatccttcctctccgtttgccgccgccaagatcgggagcagcaaaacaacaacaacaacaacaactacaacaacaacaacaccgacaacacaggagacgacaggccggcagcgagatgggcgagggagcgcggggcccggcgtgcgcggctgcaacgagccctctgcgccctccccaccgaccccctccccttccgccatgactcctccgcctcctcctcctcctcctcctcccctcgtcgtccccggaacacgctgatcctccccctgccggcggcggtcctgcgccaggcccgcgagcgcgccgacggcctgcagtggacgcccccttcgctctccgcttccgagctgctcctccccgccgtgcgagaaggaccaggaccaggaccaggaccaggaccaggaccaggaccaggaccaggacggggggcggacgaaggggaggaaaacgacgacggtgataatcatcaccagcagcagcaggactactacgatcgccaccacccattcgagacgatgccctacaacgtctcgtaccgcgagcggctccggcgcatcaggcaggcgcgcgagctggcgcggctgcgcgtggaggaggaggaggaggaggaaaaagaagaagaagagaaacaagaggacgagggaggcgggcgggtggcgctgccgcggaacctggtcgtcggcggggccgcttgtatggggccgcggtcgagcccggcgcgtgggctctccgggagggtgccgcggccgctgctcaaggccgtgctgagggccgcccggaagggggcggagaagggtcgcggtggcagcggcggcagcggcggcggggagtcgttcccggacggggatgggaggaatgtggtgcctgcgggaatcagaccggcggcggatgactgggagccgcagcagcgggaaaatgaggagggggaggttgttggtcgtggtcgtggtcgcggtcgcggtcgcggacggggggagaggcagcgacggccgaggctgcttgatacggacgaggtcgagtggctcaagttcctggccggggagtgcgtcaaccggaagaactggacgggcaggttcgtgccggacacgccgagggacaagtaccggctgtttctgctgttcgccaccaaggtgcagaagctactggacgacaagaacccccgggggctcttcgcctcgcaccgcgccgccgtcgaggtcgaggatctgctgagggccatcaacgccggcaaggacagcagcgccgtgaccaagcacgaattccggccgcacgatgcctgctgctggctcgacaggttaaagaagagcgggcatgtgagattccacctcgatccgcgttgctacggcatcgtcaagcgccccgaggccgaattcttcccggaacaccgcgtgctctggccggccgccgcggggggggccgacgagcgcccgcggcccagcttctcgcgcggcgacgtcgccgactgggggcgcgtcgtccgcgacggccacgtgcccgacaccggcgagggcagcgccatctggaactttttcctctccctggccttccgcctcggctacaccatctccacgctcgaggcagagacagaggccgaagctgaggcaggacagcggcagcagcagctcgtcgggactcgccttcgcctccgcgaggccatcgacaaatggaagcgcgcctgcgcccgcgacccttcctccgcagccagcgccgcggagccgacgccccgcgagctcgccctcatccgcacgcgcctcatcgacgagctacacgccaacgagaccatgttgcacccggcccggcggcgggtgtggttcgacaacagccgcgggcagcagcagccgcgcgccgtcctggtccgcgacttcaactgggactgggcggccgttccccgccccggccgccgtcgcaacaaccgccgccaccagttctggtccctcgaccgctggccggcgccttcctcaaaggaggacgacggcggcaaccaggaccggttcgccgacggcgccgcgacatacgaccctgccgctgccgacccgacgaccgactggcgctacacgcagccccggatgcggccgtacggctacgagcgggtgctgttccgccccggcccggccgtctaccaggccggggatacgcggctgcagagggaggtgctgcgggggctggtggaggacatggctgaccaagctgccgggctggacgaggagcagcagcagcagcagcagcagcagcagcagcagccggagcaggagcaacagccacgagcttggagcgatatgctcgcgagctggaacccactctcgcgctgttcatcgagggcagcgcgtaataaggaggcagagggacaggacgatggaggagagccggagagcaagttgccgcccgtggacgtcagcgctattccgagtagctgggatcctgttgcggcggctgagcaacacgacgacgttgacgacgttgacgacgttgacgatgatatgatgttgcttgatgacgctgacgaggcgggtgacgacggcgcccatgatgacgatgatatccagagcgtcgatgtccttatgacggggatgggcgatccatggacgacagcttga

SEQ ID NO: 3237 - protein, 1350 aa, Myceliophthora thermophilia
MAGEDSSSRPPYGSPDASRTQWLGVPAEADIPRIHQGLRIAVDAGFVKFLMDYAANNNNSDECPPLFKAYLEEVVLRPGAEDLRLQVESHLRNPRIRDFGLGPVFLRELERYSIFDQVFPPVPGRRPALPSAPIPEPYRPLAPTPGRLAETASEPPELVEPGLREGGGEETDSGDDERERAAMMERLQALEQGRAPPHRNLNAPAAPLPGPGVVSVPPPIPSRSAFGEQGRGGQDTGRLAALLRRLQSIPVLSRAGDFREQGDEAMGSRRDWEADSWYKGKRQPPLAVRLDTVVKFLAEEDVDRCLNWEARFGEVVSYLEWLALGDGSHQLQAAHPQTRATFNDAVTKAKAHVLFEKHHYEPTPPLTMMMMTKIAKPPPRHHPLRSTRLDWMVDPRRRPLPSWTAAVVPDRSELLPRAIVPRPPVPVNRMLVDRPGDRALYDRFAEDERRWWRRVAGRNGPDDIPRDDGGAKDAAAERQNLAYIEEQSFLSVCRRQDREQQNNNNNNNYNNNNTDNTGDDRPAARWARERGARRARLQRALCALPTDPLPFRHDSSASSSSSSSPRRPRNTLILPLPAAVLRQARERADGLQWTPPSLSASELLLPAVREGPGPGPGPGPGPGPGPGRGADEGEENDDGDNHHQQQQDYYDRHHPFETMPYNVSYRERLRRIRQARELARLRVEEEEEEEKEEEEKQEDEGGGRVALPRNLVVGGAACMGPRSSPARGLSGRVPRPLLKAVLRAARKGAEKGRGGSGGSGGGESFPDGDGRNVVPAGIRPAADDWEPQQRENEEGEVVGRGRGRGRGRGRGERQRRPRLLDTDEVEWLKFLAGECVNRKNWTGRFVPDTPRDKYRLFLLFATKVQKLLDDKNPRGLFASHRAAVEVEDLLRAINAGKDSSAVTKHEFRPHDACCWLDRLKKSGHVRFHLDPRCYGIVKRPEAEFFPEHRVLWPAAAGGADERPRPSFSRGDVADWGRVVRDGHVPDTGEGSAIWNFFLSLAFRLGYTISTLEAETEAEAEAGQRQQQLVGTRLRLREAIDKWKRACARDPSSAASAAEPTPRELALIRTRLIDELHANETMLHPARRRVWFDNSRGQQQPRAVLVRDFNWDWAAVPRPGRRRNNRRHQFWSLDRWPAPSSKEDDGGNQDRFADGAATYDPAAADPTTDWRYTQPRMRPYGYERVLFRPGPAVYQAGDTRLQREVLRGLVEDMADQAAGLDEEQQQQQQQQQQQPEQEQQPRAWSDMLASWNPLSRCSSRAARNKEAEGQDDGGEPESKLPPVDVSAIPSSWDPVAAAEQHDDVDDVDDVDDDMMLLDDADEAGDDGAHDDDDIQSVDVLMTGMGDPWTTA

SEQ ID NO: 3238 - DNA, 186 bp, Myceliophthora thermophilia
atggagcgacgatattccttctccccggcgaccaggcggtgtccagcgaaccacacggtaccggcgtttccgaaagcgggccgccaagccgaccgttcaagttccggggatgaccaccacggggccccgagatctgcggagtcggccgcctgtttctcggcctccgaggggaccaagagcccgtag

SEQ ID NO: 3239 - protein, 61 aa, Myceliophthora thermophilia
MERRYSFSPATRRCPANHTVPAFPKAGRQADRSSSGDDHHGAPRSAESAACFSASEGTKSP

SEQ ID NO: 3240 - DNA, 1053 bp, Myceliophthora thermophilia
atgagaggcgccgagctgttctcctcccccgaggacgaccttccccggctctggcagaagcccgcctacgaggtactcttggaaaccctcaagaagctccgcgtcgaaccccgtgtgtggagtctgcaggactcgcgcgccgatatccttaaggagcaggccgcaaccgcctacgaccggcgggaggtggtcgcgttcctgtcctccatcatcaagagcggcttgccatggctcgatagcgatgacgagcgggaagtgatctgggaagaggcaagcaagcgcatgtcggagcgctgcggccggacagcgatgggggagatcactcggcgctggcccttcgaagatcacggccacggtgccttcagcctcgtcatccgggagccgcccctgaccggggattctctcggcctcaagacgtggggctcgtcgtacgctctcgcccggctcctccaccagttcgcggacggtcctctcgcacacctgttcgtccccggggcgctctcggcaccgcacgaggtcctggagctgggctccggcaccggcctcctgggcctggcggccgcctgcgtctggaagacgagtgttgtgctcacggacctgcccaccatcatccccaatctggcgcacaacgtgtctctcaacagggaggtcgtgggccggcttggcggcaaagccgaggcggctccgttgacatggggcggttccagggaagacgtcgacccccatgttctgggagccgaactgttttcagaccccctgtacgacgacgaccacccgacgctcctggcctgcgcgatcgatgagcagctcgctctcggcacggacgcgagggtcctcgccatggttccccagagggacgagatcaccaggcgtctgctcagcagcctgcgggaggagctgggccggcggccccgcccgctgctctgtctcgaggagggcgtcgtggacggccaagacgactggggtgacgagcacggcgacggcgacgacgacgggatgcggaatgtgggtttctggtgggggatctttgggcgggccccgtcaagttgctag

SEQ ID NO: 3241 - protein, 350 aa, Myceliophthora thermophilia
MRGAELFSSPEDDLPRLWQKPAYEVLLETLKKLRVEPRVWSLQDSRADILKEQAATAYDRREVVAFLSSIIKSGLPWLDSDDEREVIWEEASKRMSERCGRTAMGEITRRWPFEDHGHGAFSLVIREPPLTGDSLGLKTWGSSYALARLLHQFADGPLAHLFVPGALSAPHEVLELGSGTGLLGLAAACVWKTSVVLTDLPTIIPNLAHNVSLNREVVGRLGGKAEAAPLTWGGSREDVDPHVLGAELFSDPLYDDDHPTLLACAIDEQLALGTDARVLAMVPQRDEITRRLLSSLREELGRRPRPLLCLEEGVVDGQDDWGDEHGDGDDDGMRNVGFWWGIFGRAPSSC

SEQ ID NO: 3242 - DNA, 318 bp, Myceliophthora thermophilia
atgccgaccgacgagaggaagcaagctaggagcagctcccctgtcgcccgggagaagctcgaggcccagattaagagcgctgatatgactgaggacatgcaacaagaggtcatcgaagtggcccaggaggcgatggcaaagtttaccatcgagaaggacattgcccagcatatcaagcgaaccttcgacgagaggaaggggcccacctggcactgcatcgtgggccgtaacttcggaagcttcgtgactcacgagaccaagcacttcatctacttctacctcggccactgcgcaatcctactgttcaagacccagtag

SEQ ID NO: 3243 - protein, 105 aa, Myceliophthora thermophilia
MPTDERKQARSSSPVAREKLEAQIKSADMTEDMQQEVIEVAQEAMAKFTIEKDIAQHIKRTFDERKGPTWHCIVGRNFGSFVTHETKHFIYFYLGHCAILLFKTQ

SEQ ID NO: 3244 - DNA, 2904 bp, Myceliophthora thermophilia
atggcctggtatggccagcagtttgaagccctttcatcgatcccgccatcgattccgccatcgattccgccggtgatggcagcacccgtcttgcgaacgcagtcacttgggccagactatggcacgccggcgtaccccagaccccagcaacgacaggaggctcgcctgcgcggcagaaagcaggggcgagggtctaacccgctcatgcccctgctgacccaggcgttccagaactaccggaagaaacaggcggacaagccagaacagaaatggcccgaggcattggaggggcacttccttgacgttcactttctgttcggcccacgacagaaagacaaggatgacaaagacgagcgccacatcgagaaggtgtcgctcaagaacaatccgatcctgattgccctgtccgagaatcggatgcccgatcagcgacccaactacgagtactttgcgcagattctcgccctgaacgaacaggtgcagttcaggcctcggcgctgctggatctttgtctcgcatccggacgtgctcgtcagcaaagacggctcggggtacttgcccacgacaggcaccaagctcggccaggccgagtatccgcacctccggcgcaacctcgagcgcgagacgtgggccagggaggaggagcagcacctattcaggggcgcactccttcacgagttcaccaaggagatccaccaggtcgaatcgggcagcgtcggcgaccttgccaggaagtgggcgtccgcgttcccgagcctccagcagcgcctgagggcgatcacgtcgtcgaccacggatggacagtgcgacgtcctgcacctgcacaccacgctcgagctgagggagaagcccggctttcctgccgactcgagcctcagctcttgggtcgagatcagcattgaacagccgcacttgctcaaccaccgatggagggtcgagacacaccttgtcgggcctccggagctcagctatgcccgcgatgactcaggggaagaaggctcgtaccaggaagatatttatgagcggcatggtgagtttaccatcaagtaccagcatcagccgggatgcgacggctcgcgcagcagcagcagcagcagcagcagcagcagcagtgacagtgcccgcggacactgtgactgcctctcgcggtgcagcggtcgggacgcgttctcggtaccgttcccgattccgttccccgctaccgcctgggcccagacactcaccaactgcgccgagtacccggcgtatccgtccagcgggagcaagaggcatgcgcgcgggtggggcgtcgagtgcgagagagaggaggacagggaagaggcgggatggcgccgacgcggcagcaaagagcctacgcaaatggacctggtccccaagatcgccatgatgcaggagatcttgtcgtgcccgccgcccgctccgtcccaccaaggggagagcagcgaagcttcttcggaacagggctggacacgtcgcgggctgatcctctggacgtttgacaccattcacagcgtggccaaggaaggagggagagaaagggggaagccgcagacggcctcgggcgggaggacctgctggcgcttcctgactattctcgatccctccagcgagcatcacctgcggcaggccgcggtcaccagccgccggacgcccgctgatgagttccggggcgtctcggacagcctcgcctgcgcttcgcggcccgggtcccgcgctgccatcccgtccccgaccccgagctacccgcagcacccgagcgcgaccacgaatgagaacttcccgccggcctggaacaatgttgctgtagggccaggtgcggcgctgtccctccctccgacgacgcgagcctacggtgccgatgtcgatgccatttcacatgcgataccaccgcgcgcggccgcgggcgaggcagggtacgagctgccggacagcttcggcggcagccacggcgggctagcaacgccgccttcgaccgcctccacggccagctcgctcacgcagcccttcagcaccgcctcggcgggctccgacgtgttcccgggctacgtgtccccgccgcacggccccgtgacgacggcggatccgggagccggcccgcacaccctcggcggcgcgctcccgggggcgatgacggacccgttcctgtcagacgtgggcggtgcatacggcggagcgcaggacggcatcatccacggctgggacagtcacgtcgccgtcgccgtcgccgtcgccgggttggatgcggatccctggtcgtcaccgggctattccgacgccagcgcggccgcccatcaggtccatcatcacgacaccatcgcctggtccgcggggacgcaaccgcaaaccgtccggtcacgccggggcagcgagcagcagcagcagcaccaccaccaccaccaccaacatcaccacccctccgggtcgccagaacagcacacgtgggcatcgtccacccactctgacagcattatcgacaaccacgaactgtggatgcccccgatcgcggcagagacccagaccccggcagcagagacggcccctcctcctccgcgtgcagacagcagccaccccgatcatcgccacgaccaccaccaccgcgcggcgtccgactcctcctcacgggactggggggaggatgaggaggaggagaggggaagagaggaagagaaagaagttgagaggcagatgagagtgcttggccatcatgtggggtcgtcagcggctggtggggccgatgaacgtggcggtggtaatggtaatggtaatggtggtggcggtgatgatgatgatgatgatgccgcctcgctgggcatgccgtcgccggtgagtcgcaagcgggcgcgagaggacgacgaccctgcgagcgatgaagaggggtatcgtcggttgagggcgaggtattga

SEQ ID NO: 3245 - protein, 967 aa, Myceliophthora thermophilia
MAWYGQQFEALSSIPPSIPPSIPPVMAAPVLRTQSLGPDYGTPAYPRPQQRQEARLRGRKQGRGSNPLMPLLTQAFQNYRKKQADKPEQKWPEALEGHFLDVHFLFGPRQKDKDDKDERHIEKVSLKNNPILIALSENRMPDQRPNYEYFAQILALNEQVQFRPRRCWIFVSHPDVLVSKDGSGYLPTTGTKLGQAEYPHLRRNLERETWAREEEQHLFRGALLHEFTKEIHQVESGSVGDLARKWASAFPSLQQRLRAITSSTTDGQCDVLHLHTTLELREKPGFPADSSLSSWVEISIEQPHLLNHRWRVETHLVGPPELSYARDDSGEEGSYQEDIYERHGEFTIKYQHQPGCDGSRSSSSSSSSSSSDSARGHCDCLSRCSGRDAFSVPFPIPFPATAWAQTLTNCAEYPAYPSSGSKRHARGWGVECEREEDREEAGWRRRGSKEPTQMDLVPKIAMMQEILSCPPPAPSHQGESSEASSEQGWTRRGLILWTFDTIHSVAKEGGRERGKPQTASGGRTCWRFLTILDPSSEHHLRQAAVTSRRTPADEFRGVSDSLACASRPGSRAAIPSPTPSYPQHPSATTNENFPPAWNNVAVGPGAALSLPPTTRAYGADVDAISHAIPPRAAAGEAGYELPDSFGGSHGGLATPPSTASTASSLTQPFSTASAGSDVFPGYVSPPHGPVTTADPGAGPHTLGGALPGAMTDPFLSDVGGAYGGAQDGIIHGWDSHVAVAVAVAGLDADPWSSPGYSDASAAAHQVHHHDTIAWSAGTQPQTVRSRRGSEQQQQHHHHHHQHHHPSGSPEQHTWASSTHSDSIIDNHELWMPPIAAETQTPAAETAPPPPRADSSHPDHRHDHHHRAASDSSSRDWGEDEEEERGREEEKEVERQMRVLGHHVGSSAAGGADERGGGNGNGNGGGGDDDDDDAASLGMPSPVSRKRAREDDDPASDEEGYRRLRARY

SEQ ID NO: 3246 - DNA, 549 bp, Myceliophthora thermophilia
atggcgtctaccgtacttcctgaatcgggcaatcctctcgtctttttcgacatcacacttggcggcgaacccctcggccgcatcacctttgagctcttcaaggacgtggttcccaagacggccgagaacttccgccagttctgcaccggcgagtacaaggaccatctcggccggccccagggctacaagggctccaagttccaccgcatcatcgccaacttcatgtgccagggcggcgacttcctcaacggcgacggcacggggtcgacgtgcatctacgggaccaagaggttcgccgacgagaacttcaacatcaagcacgaccgggcgggcctgctgtccatggccaacgcggggcccaacaccaacgggtgccagttcttcatcaccacggtgcccacgcccttcctggacggcaagcacgtcgtctttggccgcgtcgtcgaaggcatggacgtcgtccgcaagatggagcacaccaagaccggcctcaagggtaaggacgtgcccaacctggacgtcgtcattgccgagtgcggcgagctgtga

SEQ ID NO: 3247 - protein, 182 aa, Myceliophthora thermophilia
MASTVLPESGNPLVFFDITLGGEPLGRITFELFKDVVPKTAENFRQFCTGEYKDHLGRPQGYKGSKFHRIIANFMCQGGDFLNGDGTGSTCIYGTKRFADENFNIKHDRAGLLSMANAGPNTNGCQFFITTVPTPFLDGKHVVFGRVVEGMDVVRKMEHTKTGLKGKDVPNLDVVIAECGEL

SEQ ID NO: 3248 - DNA, 2298 bp, Myceliophthora thermophilia
atggcacaacaccaccacccggccacccccggagcatccgccgcaggcccttccgtcttgggcgggcaaggccaaactactaccagcgtcacgccgcaggtctctgcgtcctcatctgcactgacgccggcctcggcatcctccagcaatacgtacatcatgccgaactcgccgctcaagaaccgcggccttgcggacggctaccggcccagagtgacgcgcacccttggccagcgccctgcttgcctcgtcaatgcatccgtgacgtattgcgggaacaaccagatctacgcctttggcggtttcgaccagtacactgacgaggtgtacaaccatgtgttgcgcctggacctggtcagccaccagtggactctggtcgacaactatggcgatattccgggggttcggatgggtcacacggcaaccctttacaagggcgacaagttgctggtctttggtggggagaacgagcatcgaacctacctctccgacctgatcatctttgacctgaagacggcccactggacacagccccaagtctcggggccgattccaaaggggcgcgcacggcatgctgccgtgttacacgaggacaagctcttcatcgtcggcggcatcactggccatgataactacgtgttggacgacatatgctacctggatctaaagactttcacctggtcgaggtcgtggcgctttgtcggccgctttgatcattcggcgtacatatggagcgatcgggtctgggtattcggcggcctgagcgaggacatggacaaggttagcgacctgtggtggctcgatctcaaaggaaacccggccttcgaatctccgccgcaaatcggctacctggacaagtcgggcctggtgagaagcgccgtatcgccacggccgccctaccaggtctcacagtcccccgtggtcgggtcgtcgggttacgcagccaactcgcggacgccgcaagtaaacaccccgtcgttccatctcaagacatatgcgccccccgcaccgggcgccatctccgcgctgaaattcgtcagcggctcgtccgtcccgtcccagatgcagggcatccacttccacgtatactcgtccggaacgcttctagactttgtaacgccggcggcgaccatcacgtccaaggactgctcgctctccgcgctcgacttgggcacgttgaggtggcagaagcttgccgaaggaagggagatcttcaagccgggctaccgctggcactactgcacgctgaatgaggacggcaccaaggcatggctgctgggctgccccacggaagccggggcgatggaactcggcgctaatggcctcgaggaatacctgtccgacataatggagattgacctgcgccgctacggcttcctcggcaacaacctggcatcggaagcgaggacagacctggctcggccctcgttacgagcgcgcagtgtggaaccgccctctaagggactaggagccgatctcgcgaggctcttcaacaagcccccggagaccgggagcggcaccgatttcgtcgtcactgcgctctcgcgcgattttgacgaggatgaagttatgggctcggcgctgatgcacgcgaacgagcccgacgaaggcagccagacctggctcgctccggatgcgccgacctcaccgccgatctacgtccaccggctcatcctgcaggcccgctggccgcactttgcgcgcctctgggccagccagatggccgagttccacaccaagaagatgcacatccccgagccctacagcgtcgtcaaggccttcctctactacctctacacggaccgcatcgaccccgcggacgacgacgccgaggagaacaccatgagcgacctgtcggacgtggcgggcctgctcgtcatgtccaacatctacaacatcccgcacctgcggctgctgtgcgtcaaccgcctgagcaaggagctcgacgtggaccacgcctgcatcatctggtactgcgcgggcctggccaacgaggagtggctgcgcaagcgcgccgccggcttctgcatgacgcactggggccgcgtcgtgcgcaccgccggcttccagagactgccgcgcaccgccctggtcgagctgtcgcaggaggtcgacatggagggccgggtcgtcggcggcgacgagctcgacaacatgatcatggacggcgtgggcggccgctacggcgacggcgccctgtcggccgcctcgcgccgcaaggagagcgtcagcagcaaccagacccagatgctcgagaccgaggatgacgacgaagacgacggtatggaaatgtcctag

SEQ ID NO: 3249 - protein, 765 aa, Myceliophthora thermophilia
MAQHHHPATPGASAAGPSVLGGQGQTTTSVTPQVSASSSALTPASASSSNTYIMPNSPLKNRGLADGYRPRVTRTLGQRPACLVNASVTYCGNNQIYAFGGFDQYTDEVYNHVLRLDLVSHQWTLVDNYGDIPGVRMGHTATLYKGDKLLVFGGENEHRTYLSDLIIFDLKTAHWTQPQVSGPIPKGRARHAAVLHEDKLFIVGGITGHDNYVLDDICYLDLKTFTWSRSWRFVGRFDHSAYIWSDRVWVFGGLSEDMDKVSDLWWLDLKGNPAFESPPQIGYLDKSGLVRSAVSPRPPYQVSQSPVVGSSGYAANSRTPQVNTPSFHLKTYAPPAPGAISALKFVSGSSVPSQMQGIHFHVYSSGTLLDFVTPAATITSKDCSLSALDLGTLRWQKLAEGREIFKPGYRWHYCTLNEDGTKAWLLGCPTEAGAMELGANGLEEYLSDIMEIDLRRYGFLGNNLASEARTDLARPSLRARSVEPPSKGLGADLARLFNKPPETGSGTDFVVTALSRDFDEDEVMGSALMHANEPDEGSQTWLAPDAPTSPPIYVHRLILQARWPHFARLWASQMAEFHTKKMHIPEPYSVVKAFLYYLYTDRIDPADDDAEENTMSDLSDVAGLLVMSNIYNIPHLRLLCVNRLSKELDVDHACIIWYCAGLANEEWLRKRAAGFCMTHWGRVVRTAGFQRLPRTALVELSQEVDMEGRVVGGDELDNMIMDGVGGRYGDGALSAASRRKESVSSNQTQMLETEDDDEDDGMEMS

SEQ ID NO: 3250 - DNA, 363 bp, Myceliophthora thermophilia
atgtctacaacagcggttactgcggcggcaacgccggaaggaacagtgactaagcctcttggaatgcgaaaaaatggcaagcaatggcatgctccgaagaaagctttccgtcctggttctggcctgacaccgtacgagcaacgggcgaaggccagagttgcgcaggccgctgcgaaggctaaggagaaggagttgaaggaagaaaaggaggcagaacggaagagacggatacaagccctgaaagaaaaacgagcggcaaaggaggagaaagagcgatatgagcaattggcggccaagatgcacaagaagaggttggagcggttgaagcgcaaggaaaagcgcaacaagttgctcaactcatga

SEQ ID NO: 3251 - protein, 120 aa, Myceliophthora thermophilia
MSTTAVTAAATPEGTVTKPLGMRKNGKQWHAPKKAFRPGSGLTPYEQRAKARVAQAAAKAKEKELKEEKEAERKRRIQALKEKRAAKEEKERYEQLAAKMHKKRLERLKRKEKRNKLLNS

SEQ ID NO: 3252 - DNA, 531 bp, Myceliophthora thermophilia
atgccccccgaatcatcatcccctccctcttcctcctccgccctcccccgcagcgccgtgcgccgtctgctcaaggagctcgacacctggaccaccatcgagtcgcctaccgagcaaggcatcgagcgcctgggccccgctggcgacggcgaggaccttctcagatgggaagcggtgatcaatggccggggggtcgggtgcgggtatgagaacggccgctggctcctccagatcaccatccccccgacctacccgctccacccgccgcagatgcgcttcgcgacgccgatcgtgcacgccaacgtggcgctgcagacgggcgagatctgcctggacctgctcaaggacgcctggacgccggcctacagcgtgctcgagtgcgtgcgcgccgtgcgcatgctgctgagcgcgcccggcatcgactcgccgctcaacgtggacgtcgccgcgctgctgcgcgacggggacgcgctcggcgcgaggaggctggttgagctgtgggtggaggaggagcggttcgagggcaagtga

SEQ ID NO: 3253 - protein, 176 aa, Myceliophthora thermophilia
MPPESSSPPSSSSALPRSAVRRLLKELDTWTTIESPTEQGIERLGPAGDGEDLLRWEAVINGRGVGCGYENGRWLLQITIPPTYPLHPPQMRFATPIVHANVALQTGEICLDLLKDAWTPAYSVLECVRAVRMLLSAPGIDSPLNVDVAALLRDGDALGARRLVELWVEEERFEGK

SEQ ID NO: 3254 - DNA, 1788 bp, Myceliophthora thermophilia
atggccgaccatcagcgaatcgcaattgtttcggtctatgacaagaccgggctcctggacctggccaagggcctcgtccagcacaatgtccgcattctggcttcgggcggcaccgccaggatgattagggagtcgggtttcccggttgaggacatttctgccatcaccaaggctcccgagatgcttgctggccgcgtcaagaccctccaccctgccgtccacgccggcatccttgctcgtaacctcgcctcggacgagaaggacctggccgagcagaacatcgacaaggttgactacgtcatctgcaacctgtaccctttcaaggacacggtcgccaagatcaatgtcacggtgcccgaggctgtagaggagatcgatatcggcggtgtcactctcatccgcgcggctgccaagaaccacgctcgcgtcaccattctgagcgaccccaaggactacgccgagttcctcaaggagctcgagaccggtgagatcaaggaggagagccggaagctgtacgccctcaaggcctttgaacacactgccgactatgacgctgccatttccgacttcttccgtaagcagtacgccgccgatggcaagcagtatattcccctccgctacggtgccaatccccatcagaagcccgcctcggcctacgtcaaggagggcgagcttcccttcaaggtcctctgtggctctccgggctacatcaacctactggacgccctcaacagctggcccctggtcaaggaactcaagaaggctctcggcaagcccgccgctgccagcttcaagcacgtgtctcccgctggtgccgccattggcctgcctttgaccgccgacgagcgcaaagtctacatggtcgatgatattcccggcattgagacttctggcctcgctcaggcatatgctcgcgctcgcggcgccgaccgcatgagcagctttggtgacatgatcgctctgagcgacgttgtcgacgttcccaccgccagcatcatctccaaggaggtctccgacggtgttatcgcccccgggtacgagcccgctgctctggagatcctcaagaagaagaagggcggcaggtaccttgtcctccagatggacccggagtacgagcccagcaagaccgagaccaggaccgtctacggtatcaacctgacccagggccgcaacgacgtcgaaatctcccccgagtcgttcaagaccatcatcactcccaagaactccgggcccctccccgagagcgctctgcgcgacctgaccatcgccacggttgccgtcaagtatacgcaaagcaactcggtctgctacgctgccaggggccaagtcgtcggcctcggcgccggccagcagtcgcgcattcactgcaccaggctggctggcgacaaggccgataactggtggctgcgcttccacccacgcgtcctcggcatcaagtggaagaagggcaccaagcgcccagacaagagcaatgccattgatttgctcgtcagcggccagctccctaagtcggggccggagcgcgagctctttgaggccgccttcgaggaggtcccgcctgccttcaccgaggaggagaagagcgagtggctgtccaagctgactgacgttgtcgtgtcgagcgatgctttcttccccttcaccgacaacgtttaccgcgctgcccgttctggcgtcaagtacatcgccgcccccggtggcagccagaacgacttgcccgtcttcgagacggccgaaaagctcggtatcacgtttgttgagcagaacatccggctgttccaccactag

SEQ ID NO: 3255 - protein, 595 aa, Myceliophthora thermophilia
MADHQRIAIVSVYDKTGLLDLAKGLVQHNVRILASGGTARMIRESGFPVEDISAITKAPEMLAGRVKTLHPAVHAGILARNLASDEKDLAEQNIDKVDYVICNLYPFKDTVAKINVTVPEAVEEIDIGGVTLIRAAAKNHARVTILSDPKDYAEFLKELETGEIKEESRKLYALKAFEHTADYDAAISDFFRKQYAADGKQYIPLRYGANPHQKPASAYVKEGELPFKVLCGSPGYINLLDALNSWPLVKELKKALGKPAAASFKHVSPAGAAIGLPLTADERKVYMVDDIPGIETSGLAQAYARARGADRMSSFGDMIALSDVVDVPTASIISKEVSDGVIAPGYEPAALEILKKKKGGRYLVLQMDPEYEPSKTETRTVYGINLTQGRNDVEISPESFKTIITPKNSGPLPESALRDLTIATVAVKYTQSNSVCYAARGQVVGLGAGQQSRIHCTRLAGDKADNWWLRFHPRVLGIKWKKGTKRPDKSNAIDLLVSGQLPKSGPERELFEAAFEEVPPAFTEEEKSEWLSKLTDVVVSSDAFFPFTDNVYRAARSGVKYIAAPGGSQNDLPVFETAEKLGITFVEQNIRLFHH

SEQ ID NO: 3256 - DNA, 2349 bp, Myceliophthora thermophilia
atgacagtgccagaggccaatccgcgtgagaaggagccaatccgttccccgtccagtcaagatggcgatggctcttcttgggaccgggctgtcgccgagtttgcaagccaggccgagaagctctcccttcagcatccgtccgaaaccgccgtcggggacggagtcgccgccgaagcacgctttgtgacgccccgagacccagtacttgtcacggcggacggcaaccgcttggctccggtgccgttggaagaggcacacaagctgaatgtgctgcgggaagagctgcaacatcacgaacctggaacagtagcatcggcaggcggggaagactatggcatcagtgcagagggacctgcgccaccaatgaagagggcggttgatgttgccgcggaaaaggcaaaagaacggggagcaaaatcgccggacgggagtcttcggcgggctatgcccccgacgcacacgaaccctctattcccgccgttaccactctacggccctccttctctactccgaaacctccagtgtcgcgtgtttcagatatcgtcgttctttctcagccttgcctttctcagtgtcatcgtcctcggtgcgctcttcaccagcatcggcccgtcgctgcggcggctctggctgcgtgcaacactgcgggaccccgaccgcgcccgtccgttctacgccgaggaggtcaacgagaggaaaaggaggcttgagagagaacgagaatggagagagggtatccgctccggcgatgatggcttcacacccagcgaaggagggcccgacccgattgtgtgtgatccggcatactatgcccgccgcgttggtctggacatggaaagcttccaagttcagactgaagacggttttatcattgagctctggcacgtctatgatccgagggaataccgacctctgtccgggagtgaccgcgctgctggcggcccagagaccctcgagcgcctcgaccaaagagatcccagccacaacgccatcaacggcagcaacagcgcacgggacgagagccagggcaacaaccagaagcccaagttccccgtcctcctcatgcacggcttgctccagagctccggcgcgtattgcgtcaacgacgacgcgtcgctggctttcttcctctgcaagtcgggctacgacgtctggctgggcaacaaccgctgcggcttctcgcctagacacgccctgctcgactactcggacccgcgcatgtggtgctggaatatacggcaaatgggcgtcttcgacctgccggcgctggcgtcacgcgtactggtcgagaccggcttcgcgcgactcgggctcattgcgcactcgcagggcaccacgcaggcgctggtggccctggccaaggagcagcgcccggacctgggcgagaagctcaccgtcttctgcgccctggcgcccgccgcctacgcggggccgctcatcggcaagatgtacttcaagttcatgcgcgtcatctcgccggccatgttccgcctcatgttcggcatccacgccttcatcccgctcatgatgaccatgcaccgggcgctgcacccctgcgtgtacggctggctcgggtacaaggtgttttccttcctcttcaactggaccgacgcccggtgggaccgcgggctgcgggaccgcatgttccagttcgcgcccgtctacgtcagctccgagtcgatgcgctggtggctagggagggagtgcttcgccaggcacaagtgcatcctcgcgaccaaggaggagtggagggccgaggagagggaggacgcccgggagcgggagcaggagcaggagcagcaggggagggggacgctgtcgtcgtcgtcggtgctggcgcgggcggtccgggacatggagggggacgaaggggtgaggaggtcggagcaggcggccggggcgtacagcaagaggaagccgagggggtcgacggcgtggtacaatcaccaggcgccgccctttgcgctgtgggtctgcggcaacgacgcgctggtggacggcgaaaaactgcttaggcggttcgagcgcggccgggagccgcacgtcagggtcgtccacagcaaggtcattcccgagtacgagcacttggatgtcatttgggccatggacgcgccggagcaggtgttcaaggaggtgcgggaagtgctgtggaagacgtgcgacgtcagggacctgtgccgcgtgccgaagggttgcgaggacgtggagccctgggtgcctccagacaagcagcacctcggagagcaaggggaagaagaagaacaggagggggaggagggggagggggaggagggggaggataaccttatgtcaagcagcagcgaggacccgtcttcgcaagatttctaa

SEQ ID NO: 3257 - protein, 782 aa, Myceliophthora thermophilia
MTVPEANPREKEPIRSPSSQDGDGSSWDRAVAEFASQAEKLSLQHPSETAVGDGVAAEARFVTPRDPVLVTADGNRLAPVPLEEAHKLNVLREELQHHEPGTVASAGGEDYGISAEGPAPPMKRAVDVAAEKAKERGAKSPDGSLRRAMPPTHTNPLFPPLPLYGPPSLLRNLQCRVFQISSFFLSLAFLSVIVLGALFTSIGPSLRRLWLRATLRDPDRARPFYAEEVNERKRRLEREREWREGIRSGDDGFTPSEGGPDPIVCDPAYYARRVGLDMESFQVQTEDGFIIELWHVYDPREYRPLSGSDRAAGGPETLERLDQRDPSHNAINGSNSARDESQGNNQKPKFPVLLMHGLLQSSGAYCVNDDASLAFFLCKSGYDVWLGNNRCGFSPRHALLDYSDPRMWCWNIRQMGVFDLPALASRVLVETGFARLGLIAHSQGTTQALVALAKEQRPDLGEKLTVFCALAPAAYAGPLIGKMYFKFMRVISPAMFRLMFGIHAFIPLMMTMHRALHPCVYGWLGYKVFSFLFNWTDARWDRGLRDRMFQFAPVYVSSESMRWWLGRECFARHKCILATKEEWRAEEREDAREREQEQEQQGRGTLSSSSVLARAVRDMEGDEGVRRSEQAAGAYSKRKPRGSTAWYNHQAPPFALWVCGNDALVDGEKLLRRFERGREPHVRVVHSKVIPEYEHLDVIWAMDAPEQVFKEVREVLWKTCDVRDLCRVPKGCEDVEPWVPPDKQHLGEQGEEEEQEGEEGEGEEGEDNLMSSSSEDPSSQDF

SEQ ID NO: 3258 - DNA, 1845 bp, Myceliophthora thermophilia
atgacgacttcccaagacgacggcgcgtttcggcaagtcgagactggcggcgagtctctccctagcagctcgaggggccccagccccgccagccgcgaccgccatctcgatcagagcaccagagcggtatgccgatggcggaccgcgcggtatcacgaccacgaatgctcgcgatattttgactgccctacccacgtcgttgagcgcgcgctatccgacgccggagagtcgtcaggaggacaaggagaagaggaagcggaaggacaccgagggaaccaagaacacggagaagaggaaggtgcgcaaccgggtgcgagccaaacccgtctcgatccgggggaggtctcgccgcggagttccggcgaccgagagggcgatggtcatcagcaggctcggcatccttcgccggaacaccaccccgaaacgtccggagaggccgatgccacctcgcaggcccgtaggattgaagaaccagacgcacggcaggacgacgctacgtcgacaagtcaaaacaacgagcccacgccgaggaacacctccccgtcggttgcgcagccacggcccgagccaggatcgcgggcggcgagcggagggcctgcagctccgcctcccgggttcatgccgagagataccggggtttccggccgtcaagttagcatgccgcctgccgctgacccgcccactctgtcgacaacacccgctcagcgcgctcctccagaggtggtgctgccgaggtggcagccggattccgaacagacctactgcccgatttgcggcacgcagttcagcattttcgtcaggaaacaccactgccgcaagtgtggtcgggtcgtttgcaacgcgtgctcgccacaccgcatcaccatcccccaccggtatatcgttcggcctcctggggcgcccagtccgctctcccaaggtccttccctttccctcttagacagccaaggctggtatcccgaattctcggggggcgagagagtcaggctatgcaacccttgcgtccctgaccccaacacggcgccgcctcagagccaggcgcatcaacaaagctcgcagaacgacccggcttcgcccggccgggccgacagctcgtcatccaatagatggaacttctactttggcgccggagccgcgaatgaccctcagacgaggactcggagcgctactctgcaacccgggccgtcatcgtcttcccagccgccggtcccaccaccacatcgtagtaactacgaggctcgtattctctggggcaccccgcctgcctactaccggccgacggccacctcgcagtccgccccgttctacccgggcaccgcgccccggtaccggtcgatgttcgacgtcggcaacaggccgggcccctccaccatcgccggcccttcgtcctcctcctcctcctccagcgcctcccgcactttccatccccccgtgcgccggcgcccgcagatccccgaggaagacgagtgccccgtctgccaccgcgagctcccgccgcggaccctccccaacttcgagaccctccgcgaggcccacatcaccggctgcatcgagtcgcacagccgatacggcggccgcccacccgcctcggcgggggaggacggcagcagcccggacggcgcgcggcccgggccccggaggaccggcatgttcccctacacggcgaccgagaaggactgcgtcgactcggccgagtgctccatctgcctcgaggagttcgaggtcggcgtcgccatggcgaggctcgagtgtctctgccgcttccatcgggcctgcatcaacgcctggtgggagcgccacccggggaggtgtccggtgcaccagcacgacgggttcggctattaa

SEQ ID NO: 3259 - protein, 614 aa, Myceliophthora thermophilia
MTTSQDDGAFRQVETGGESLPSSSRGPSPASRDRHLDQSTRAVCRWRTARYHDHECSRYFDCPTHVVERALSDAGESSGGQGEEEAEGHRGNQEHGEEEGAQPGASQTRLDPGEVSPRSSGDREGDGHQQARHPSPEHHPETSGEADATSQARRIEEPDARQDDATSTSQNNEPTPRNTSPSVAQPRPEPGSRAASGGPAAPPPGFMPRDTGVSGRQVSMPPAADPPTLSTTPAQRAPPEVVLPRWQPDSEQTYCPICGTQFSIFVRKHHCRKCGRVVCNACSPHRITIPHRYIVRPPGAPSPLSQGPSLSLLDSQGWYPEFSGGERVRLCNPCVPDPNTAPPQSQAHQQSSQNDPASPGRADSSSSNRWNFYFGAGAANDPQTRTRSATLQPGPSSSSQPPVPPPHRSNYEARILWGTPPAYYRPTATSQSAPFYPGTAPRYRSMFDVGNRPGPSTIAGPSSSSSSSSASRTFHPPVRRRPQIPEEDECPVCHRELPPRTLPNFETLREAHITGCIESHSRYGGRPPASAGEDGSSPDGARPGPRRTGMFPYTATEKDCVDSAECSICLEEFEVGVAMARLECLCRFHRACINAWWERHPGRCPVHQHDGFGY

SEQ ID NO: 3260 - DNA, 450 bp, Myceliophthora thermophilia
atgaccaatcggaggaaacatttatacaatacgaattacgaacaccacacccgtcgttcgccaagccacccagggtccttcatgtgtagtgccccaccagggcgaccgcgacggaaatgtgactttcgcagttcatctagtactgtacctgttggcaaatggcgtttgactacggcgaagcacaacaattcctgttctgttcgaaaatatcgatgctcagttcgtgaaccgcagcgagccttgcagtcggacccgcatgcatcagcaattgcagaggttttgccgagctctcaggacctacacaaccgcgagagcttgagtcaccccgcgcccgattcccacccacattttgatgcagaccccgtggatccgcgctcttcggtctgccagaccacaacgaggcctaaaatcagccttgacgaccttgtcgacgacatcctgcaagcttag

SEQ ID NO: 3261 - protein, 149 aa, Myceliophthora thermophilia
MTNRRKHLYNTNYEHHTRRSPSHPGSFMCSAPPGRPRRKCDFRSSSSTVPVGKWRLTTAKHNNSCSVRKYRCSVREPQRALQSDPHASAIAEVLPSSQDLHNRESLSHPAPDSHPHFDADPVDPRSSVCQTTTRPKISLDDLVDDILQA

SEQ ID NO: 3262 - DNA, 1704 bp, Myceliophthora thermophilia
atggcgccctcgaagacacccaagttcgagatcaagacgcctaagggcacccgagactggtccggtccggacatggtgctcagggaaaagatcttcaaaacaatcaccgatgtcttcaaacgtcatggtggtgttaccatcgacacccccgtgttcgaactgaaggagatccttgcaggcaaatatggcgaggacagcaagctcatctacgacctggcggatcagggtggtgagctttgcagcttgcgatatgacttgaccgttcccttcgcccggtacttggcgatgaacaaggacgtcactcagatcaagcgctatcacattgccaaggtctaccgcagggatcaaccggcagtgaagaagggccgcatgcgagaattctatcaatgcgagtatgtgtcgtgcctaacaccctccccctccacccccccccaaaaaaaaagcatttccagtcgcgtctatttcacagatgtcaagttaacgatttcgtttcatggaaacagtttcgacattgctggcgtatacgatcccatgattccggatgctgaaattatcaggatcatcaacgaggtctttgagggtcttggctggcatgggaagtacactatcaagctcaactcccgcaagattctcgacggccttttccaagtctgcggtgtgccggacaatctcatccgccccatctcctctgccgtggacaagctcgacaagatgccttgggccgacgtcaggaaagagatggttgacgagaaggggttggccccggaggttgccgacaagatcgggacttacgtggttctcaaggggaagcgagacctcctcgagaagttgaagcaggatgaggccttggcggcaaacccatcgatgcagcagggcttcgcagacatggatcttctcttcacttatcttgaggactttggggccgaccacactgtttctttcgatctgtcgttggccagaggccttgattactacacaggcgtcatctatgaggtggtaacagaaggttctgcgcctgctgtctccgcatcaggggaggccaaggaaaagcaggctaagaagaagggtggtaagcccggggatcctgaggaggaccgttccgacgaccctacgcttggaatagggtctgttgctgctggtggcagatacgacaaccttgtgggcatgttctccggcaagacgcaagtgccctgcgttggtatcagcttcggcatcgaccgtattttctccatcatccaggccacccagaagaagaaggagcggcgaaacgaggtcgaagtcttcgtcatggcgttcggcggcggcaaggactttactgggctgctcaaggagaggagtcaggtctgtgcccgtctgtgggacgcagggatcaaggccgagttcctctacaaggtgaagcccaagctccagaaccagttcaaagcggccgaagcaaacggcgtgccatttgcccttattttgggtgaggacgaactggcccaaggaaaggcgaggttcaaggagatgggtcttcccgaggaccacccgctgaaggagggcgagctcatcagtcttgataacctcattgaggaagtgaagacacgcctcgcgcggaagcaggagcttgacagtatcacacaacaagccgagggcctcaaggtcgttggtggggttaaaggggaagatgtcaaagctcctgcagaaacggctcagtctaccgagtag

SEQ ID NO: 3263 - protein, 567 aa, Myceliophthora thermophilia
MAPSKTPKFEIKTPKGTRDWSGPDMVLREKIFKTITDVFKRHGGVTIDTPVFELKEILAGKYGEDSKLIYDLADQGGELCSLRYDLTVPFARYLAMNKDVTQIKRYHIAKVYRRDQPAVKKGRMREFYQCEYVSCLTPSPSTPPQKKSISSRVYFTDVKLTISFHGNSFDIAGVYDPMIPDAEIIRIINEVFEGLGWHGKYTIKLNSRKILDGLFQVCGVPDNLIRPISSAVDKLDKMPWADVRKEMVDEKGLAPEVADKIGTYVVLKGKRDLLEKLKQDEALAANPSMQQGFADMDLLFTYLEDFGADHTVSFDLSLARGLDYYTGVIYEVVTEGSAPAVSASGEAKEKQAKKKGGKPGDPEEDRSDDPTLGIGSVAAGGRYDNLVGMFSGKTQVPCVGISFGIDRIFSIIQATQKKKERRNEVEVFVMAFGGGKDFTGLLKERSQVCARLWDAGIKAEFLYKVKPKLQNQFKAAEANGVPFALILGEDELAQGKARFKEMGLPEDHPLKEGELISLDNLIEEVKTRLARKQELDSITQQAEGLKVVGGVKGEDVKAPAETAQSTE

SEQ ID NO: 3264 - DNA, 468 bp, Myceliophthora thermophilia
atgtcggtgccgtttgctgcgaaaaggttgggtaaggagctccagaagatcagcagctcgttgccgccagggatcgagcttgtctcggctgacaatttcgaggaatggctgctggacatcaaggtgctggataacaacccactctaccaaaaccaaacatacaggctgaaattccgttttagcccgtcataccctatcgagcctcccgaagtcgtcttcgtccagcttcctgaccgtccaatcccgatacatcctcacatctactccaacggaatcatctgtcttgacttactcggccagcaaggatggagccccgtgcagaacgtcgagagcgtttgtatgagtctgcaaagcatgcttaccgggaactccaagaacgagcggcctcctggagatgaggaatttgttcggggcaacactatgcgacctagggacatccagttctactatcacgataacgacgtgtga

SEQ ID NO: 3265 - protein, 155 aa, Myceliophthora thermophilia
MSVPFAAKRLGKELQKISSSLPPGIELVSADNFEEWLLDIKVLDNNPLYQNQTYRLKFRFSPSYPIEPPEVVFVQLPDRPIPIHPHIYSNGIICLDLLGQQGWSPVQNVESVCMSLQSMLTGNSKNERPPGDEEFVRGNTMRPRDIQFYYHDNDV

SEQ ID NO: 3266 - DNA, 1071 bp, Myceliophthora thermophilia
atgtctaacctcttctctggaatcaacgcccgcttccgcggccagagaagcccaaactcgggcgcaagctccccgagccccgagcagcagcaggcgcaggcgcaagcacaggctcaagcacaagcgcaagcccagggacaacacccaggaaatctaccccaagggcagccaggaagccagtcttcctcctccaatcttgcagtgaagctcccgccactccccacctcgccatcacttgctgagaccatcggcatggaccaggccagcggcatggtgccgtcagcggaggaggttctcgcttcgtaccacctgcctcccgtgaaacctctgtggctcaacgccaactatgcgaagcacatcgtcaagggtaactttctcacgctcagcgcaaagcccaagacggtcgagatgggggaatggattgcgcaccaagttgtcgaccactggaggatgttgattacttttatccgcctggtccacgacaaggaagaggatggcacctccatctgcaattctaggagatgcgccaagatcaaccactcgttcacctggctcaactctcggtaccagcccgtcgagatccccgcctacgagtacttgaccctcgtgcagcggtacatcacgggtaaactcgatgacacaagcatcttcccaacggacccagctggcgtctcgtacgccgacaacccggccttctgcaccccggtaccggaatcaggcccggattgggtgggtaagcggagtgggtttccacagaatttcatggagacgtgccaggccatcttccgccagatgttccgggtttatgcccacctgtactggtcacacttcgaggacatgttctgcctgaacctcgagaagtcgatgaacagctgcttcagccacttcatcctcaccgcaaccacgttgaacctgctgaagaagtcggatctcgagcccatgcagccgctgatcgacctctgggcggctctcgggacgtttcctcagggatccaaggcgtacgagattgccaacattgcagttggacagctgctgatccagaaggcggggggaccgcccgccagtaattga

SEQ ID NO: 3267 - protein, 356 aa, Myceliophthora thermophilia
MSNLFSGINARFRGQRSPNSGASSPSPEQQQAQAQAQAQAQAQAQGQHPGNLPQGQPGSQSSSSNLAVKLPPLPTSPSLAETIGMDQASGMVPSAEEVLASYHLPPVKPLWLNANYAKHIVKGNFLTLSAKPKTVEMGEWIAHQVVDHWRMLITFIRLVHDKEEDGTSICNSRRCAKINHSFTWLNSRYQPVEIPAYEYLTLVQRYITGKLDDTSIFPTDPAGVSYADNPAFCTPVPESGPDWVGKRSGFPQNFMETCQAIFRQMFRVYAHLYWSHFEDMFCLNLEKSMNSCFSHFILTATTLNLLKKSDLEPMQPLIDLWAALGTFPQGSKAYEIANIAVGQLLIQKAGGPPASN

SEQ ID NO: 3268 - DNA, 2991 bp, Myceliophthora thermophilia
atggataacgcctttgcgaagtcgatcgaccaagtacttgacactctcggcgtgaacagggcgaccggcttgaccgatgagcaggtgacgagattacgagccaagtacgggaaaaacgcaattcccgaagagcctcctacccccctctggaaactcattctcgaacaatttaaagatcagctcgtccttatccttctcggttcggcggcaatttcgtttgtgctggcgctcttcgaggacgagggaggatggagcgctttcgtggaccctatcgtcattctcaccatcctgatactcaatgctgtcgtcggagtctcgcaggagagtagcgccgagaaggccattgcggccttgcaggaatactcagctaacgaggccaacgtggtgcgcaatggccagactcaccggatcaaggcggaggacctagtgccgggggacattgtcgatgtgactgtgggcgcgcgcatccccgccgattgccggctcatttcgatcgaaagcaacagcttcgccgtcgaccaggcgattctcaccggcgagagcgaaagcgtgggcaaggactgccacgccgtcatcagcgacgacaaggcggtgctccaggaccaggtcaacatgctcttctccggcacgaccgttgtgaccggccacgccaaggctgtagtcgttctgactggctcaaacacggccattggggacatccacgagagcatcaccgcccagatctccgagccgacgcccctgaagcagaagctcaacgacttcggcgaccagctcgccaaggttatcaccatcatctgcgtcctcgtctggctcatcaacatcccccacttcagcgacccgacccacggaaactggaccaagggcgccatatattacctcaagattgctgtttctcttggtgttgcggcgattcccgagggccttgccgtcgtcatcactacctgccttgccctcgggacccgcaagatggctgcaaagaacgcagtcgtcaggagcctgccttctgtcgagactctggggagctgcagcgtcatctgctctgacaaaaccggcaccctaaccacgaaccaaatgagcgtcagcaagattgtctacttgaacgacgatgggtctgacttggaggagctcgacgtggagggaacaactttcgagcccaagggtgacatcaagttccaaggccaggtgctgcgggatctcacacaggagtcggccactgtcctccagatgaccgaagtagccgcgctctgcaatgacgcccgcctcgactaccactctcattcggcaacctattcaaacgttggcgagcccaccgaaggcgctctgcgggtcatggtcgagaagattggcccttgcgcgccagctgattgccacccccaagatcgcgtccactatgccagctcctggtacgagaagcagtataagcgcctcgcgacttacgagttctcgcgcgatcggaagagcatgtcggtcctagttcaaaacgggcaggagcagaagctttttgtcaagggcgcccccgagtccattattgaacgctgcacccatgctgttcttgggcgtcacgggaagagggtacccctggatcggaagctcgctgacttgcttctgaaagaagtcgtcgagtacggtaaccggggtcttcgtgtcatggcgctggcgcgccgcgagcaagtcaacggcgaacctcttctgcacaaggccaggaccagcaccgagtatgccgctctggagcagaacctgaccctcatcggtctcgtcggcatgctggatcctcctcgtccggaggttcccgcggccatccagaagtgcaagggggcgggtatccgcgtcattgtcgtgaccggtgacaaccgcaacactgccgagaccatctgccgccaaatcggggtgttcggccctgacgaggacctgaccggcaagagcttcaccggccgcgagtttgacaacctgagtccgagcgagcagctggaggcagccaagaacgcctctctcttctctcgtgtcgagccagcccacaagtcgaggcttgtcgaccttctgcagtcgctcggccaggttgttgccatgactggtgacggtgtcaacgacgcgcccgccctcaagaaggctgacatcggtgtcgccatgggctccggcacagatgtgtccaagctggcggccgacatggttctggccgacgataactttgccaccattggcgtcgccatcgaggaaggtcgctccatctacagcaacacgcagcagttcattcgctacctgatctcgtccaacattggcgaggtcgtctccatcttcctgaccgccgctctgggcatgcccgaggctctcattcccgtccagcttctctgggtcaacctggtcaccgacggtctccctgccactgccctgtcgttcaacccgcccgaccatgacattatgaagcggcagccgaggaagcgcgacgaggccttgatcggcggctggctgttcttccggtacctggtcattggcacatacgtcggcctcgccacggttgccggttacgcgtggtggttcatgttctactctggcgggcctcagatcagcttctaccaactgtcgcacttccaccgctgctcctcggagtttcccgagatcggctgccagatgttcaccaatgacatggccaagtccggctcgaccgtctcgctgtcgattctggtcgtcattgagatgttcaacgccatgaacgcgctgtcttcgagcgagtcgctcctgacgctgcctgtgtggaagaacatggtgctggtgtatgcgatcgctctgtcgatggcactgcactttgccctgctgtacattcccttcttgcagactcttttctccatcctgccgctcaattggaccgagtggaaggcagttcttgcctttagtgcacctgttgttctcattgatgaaggtctcaagtttattgagcgaacattcttcgtctcgagttcaactcgtaagctgcccaaagcaaagaaggaccaatag

SEQ ID NO: 3269 - protein, 996 aa, Myceliophthora thermophilia
MDNAFAKSIDQVLDTLGVNRATGLTDEQVTRLRAKYGKNAIPEEPPTPLWKLILEQFKDQLVLILLGSAAISFVLALFEDEGGWSAFVDPIVILTILILNAVVGVSQESSAEKAIAALQEYSANEANVVRNGQTHRIKAEDLVPGDIVDVTVGARIPADCRLISIESNSFAVDQAILTGESESVGKDCHAVISDDKAVLQDQVNMLFSGTTVVTGHAKAVVVLTGSNTAIGDIHESITAQISEPTPLKQKLNDFGDQLAKVITIICVLVWLINIPHFSDPTHGNWTKGAIYYLKIAVSLGVAAIPEGLAVVITTCLALGTRKMAAKNAVVRSLPSVETLGSCSVICSDKTGTLTTNQMSVSKIVYLNDDGSDLEELDVEGTTFEPKGDIKFQGQVLRDLTQESATVLQMTEVAALCNDARLDYHSHSATYSNVGEPTEGALRVMVEKIGPCAPADCHPQDRVHYASSWYEKQYKRLATYEFSRDRKSMSVLVQNGQEQKLFVKGAPESIIERCTHAVLGRHGKRVPLDRKLADLLLKEVVEYGNRGLRVMALARREQVNGEPLLHKARTSTEYAALEQNLTLIGLVGMLDPPRPEVPAAIQKCKGAGIRVIVVTGDNRNTAETICRQIGVFGPDEDLTGKSFTGREFDNLSPSEQLEAAKNASLFSRVEPAHKSRLVDLLQSLGQVVAMTGDGVNDAPALKKADIGVAMGSGTDVSKLAADMVLADDNFATIGVAIEEGRSIYSNTQQFIRYLISSNIGEVVSIFLTAALGMPEALIPVQLLWVNLVTDGLPATALSFNPPDHDIMKRQPRKRDEALIGGWLFFRYLVIGTYVGLATVAGYAWWFMFYSGGPQISFYQLSHFHRCSSEFPEIGCQMFTNDMAKSGSTVSLSILVVIEMFNAMNALSSSESLLTLPVWKNMVLVYAIALSMALHFALLYIPFLQTLFSILPLNWTEWKAVLAFSAPVVLIDEGLKFIERTFFVSSSTRKLPKAKKDQ

SEQ ID NO: 3270 - DNA, 1764 bp, Myceliophthora thermophilia
atgggcgacttcaccaactttggggggactgacgaagagaatgccgagattaagcgcctcaatgccgatgtggaggcggatccggacaacttcgagaattgggagaaactgattcgcgcctgcgaaggcctcgagggtggcctcaatcgcaactccagtccccaggctttggcgacgcttcgcgactcttacgaccgctttctcctcaagttcccgcttctcttcggttactggaagaagtatgccgacctggaattcaacatctcagggcccgagtcggccgaaatggtctatgaaagaggttgcgctagcattaccaactctgtcgacctctggaccgagtattgttctttcaagatggaaacaactcacaccccccaccttgtgagagaactgtttgagcgtgcagcttcgcatatcgggttggacttcctctcccacccgttctgggacaagtaccttgaatacgaaacgcggcaggaggcgcaggataggatttttgcgattctcaaccgcgttatccacatcccgatgcatcaatatgctcgctactttgaacgcttccggcagatggctcacacacgacccctagaagaactggttgcggccgacatgttggctcggtatcgcgccgaagtggaagctgaggccgcacagtttggcgtgcaaaagaccgaactggaaatcgagcgggatatccgggcgaagatcgacgcctcattctacctcatcttccagcgcactcaggaggagacgagcaagcggtggacgtacgaggccgagattaagcggccgtattttcacgttacagagctcgatcattcccagctggccaactggcggaagtacctcgactttgaggaagcagagggcaactatcagaggatcgtttgcctctacgagaggtgccttgtcacctgcgccctctacgacgagttctggcttcggtacgcgaggtggatgtcggcacaggataacaaggaggaagaggtgcgaaacatttacttgcgcgcgaccacgctgtttgttcccatcagcagacctggtgtccgcctccagtttgcttatttcgaggagatgtgcggccgggtcgacgtggcccgggacatccatgcggcgatcctcacgaagctaccagattgcgtcgaggcgatagtctcgtgggccaatctacagcggcgacagagcgggctggatgcagcgattgaggtgtacaaggctcagatcgactcccccgtcgttgacatcttcaccaaagccgcgttggtcactgaatgggcgttcctgctgtggaaggtcaagggctccgtcgaagaagcacggacagccttcgccaagaatgtggagtggtacgccgatagtcgtcacttctggcagaaatggctcgagttcgagctggagcagccgaccaatgcggaactggaagcgcagcatgccgagcgggtcaagaatgtctttgccgagatgcggaccaaaagccgtctctcgccaggcgtcaagcaggaactcggtcaagtgtacctgacctacctgcaacagcgtgggggcaagcaggccatgaaggagttcctccatatcgaccgagagctctttggaccccagtcaatttcccccatcaccaaggcgaagctgtcgaaggaaactgctggccttccgggccttgatgaggcaacccgtgccaaagcggagaggcggttctacaactactaccagttgcatatggacccggatcctaatgcccaagggcccgctagctttgaataa

SEQ ID NO: 3271 - protein, 587 aa, Myceliophthora thermophilia
MGDFTNFGGTDEENAEIKRLNADVEADPDNFENWEKLIRACEGLEGGLNRNSSPQALATLRDSYDRFLLKFPLLFGYWKKYADLEFNISGPESAEMVYERGCASITNSVDLWTEYCSFKMETTHTPHLVRELFERAASHIGLDFLSHPFWDKYLEYETRQEAQDRIFAILNRVIHIPMHQYARYFERFRQMAHTRPLEELVAADMLARYRAEVEAEAAQFGVQKTELEIERDIRAKIDASFYLIFQRTQEETSKRWTYEAEIKRPYFHVTELDHSQLANWRKYLDFEEAEGNYQRIVCLYERCLVTCALYDEFWLRYARWMSAQDNKEEEVRNIYLRATTLFVPISRPGVRLQFAYFEEMCGRVDVARDIHAAILTKLPDCVEAIVSWANLQRRQSGLDAAIEVYKAQIDSPVVDIFTKAALVTEWAFLLWKVKGSVEEARTAFAKNVEWYADSRHFWQKWLEFELEQPTNAELEAQHAERVKNVFAEMRTKSRLSPGVKQELGQVYLTYLQQRGGKQAMKEFLHIDRELFGPQSISPITKAKLSKETAGLPGLDEATRAKAERRFYNYYQLHMDPDPNAQGPASFE

SEQ ID NO: 3272 - DNA, 1230 bp, Myceliophthora thermophilia
atgctgcaggagagcgactctctaagctcgcctaacggcaggtcaaccgcccctcacatgacggggaggggaagtgctgcagattatccccacttatgggtttcgcggcgatgcgttttccagtacggagtacggattacactaggttatgacccacctaccggggacgcgatccagatcaaagacgatcagacgatccaccaatcccttgttgaggatcatcaacaagggcggctctgcccagggcagcaacgatcccctgatgggagtatcgataataaaacgaacttgatgaaattttaccggactcgtgcactccatagtgtgcgctattatagggcgcatttacacgtgtcgcccatgcattccttgacggggattgcacagtcagtgggcgctcgcttccaggcagcagctggagagcaattggcaaaagataacaacatcgaaacggaaattcagccgagggaccttctactgggtgcaattgttagccgttcaatagtcaatcccagaaacccggcgccgccgcaagacgaaaagaagctacatagtagacaactcggtttctggctgggatatgtggggagacgggcgacgaagaggatggattgggttgtttgtttgacacatcatcccggcatccggagtgctggcgtcccatctcgtattgaccacggccgtgcagctgcgggcttacatattgtcacggccatctcatgcagtcgtcccttgtcagcaattggcccaagaccaggctcggccggcagtggccgggatccgcggtccctggatcctcgacggggccacgagcgcgatgcttgttgtagggagcctaaggacaggacaggcctacagtacactaaaatccgcactttcgactatcgagtgtactgtacagagtggatatgcactaccatacactacactaccgagcgtatcagtacggagctcacgaccaaaaccctttcacgcgcagcgggtggaccgcccctattataccaagtagtccgatacacctatctgtccaagagagcagcggacaaggtcacatctggcgattccgcgctcccaacgtggatgcgatctatcgacgaccccctgtcgcattcttcaacccacgctgtcaccctccaactcccaccagccctggcaaccgtggccgccgccctatccacacttggaacagaatacggattgcatacgcttcgaacatacgctagtgcctaa

SEQ ID NO: 3273 - protein, 409 aa, Myceliophthora thermophilia
MLQESDSLSSPNGRSTAPHMTGRGSAADYPHLWVSRRCVFQYGVRITLGYDPPTGDAIQIKDDQTIHQSLVEDHQQGRLCPGQQRSPDGSIDNKTNLMKFYRTRALHSVRYYRAHLHVSPMHSLTGIAQSVGARFQAAAGEQLAKDNNIETEIQPRDLLLGAIVSRSIVNPRNPAPPQDEKKLHSRQLGFWLGYVGRRATKRMDWVVCLTHHPGIRSAGVPSRIDHGRAAAGLHIVTAISCSRPLSAIGPRPGSAGSGRDPRSLDPRRGHERDACCREPKDRTGLQYTKIRTFDYRVYCTEWICTTIHYTTERISTELTTKTLSRAAGGPPLLYQVVRYTYLSKRAADKVTSGDSALPTWMRSIDDPLSHSSTHAVTLQLPPALATVAAALSTLGTEYGLHTLRTYASA

SEQ ID NO: 3274 - DNA, 591 bp, Myceliophthora thermophilia
atgtccgactctccccaatccaatccaaaggatgtcgaacaaggtgcaccgtcgggtgacgacgaaggacaaatgaacgaccctcaggacccacactcgaccgggctcggctacgagttcgaggttaaagagcaggatcggtggctacccatagccaatgtggcccgtatcatgaagacggcgctccccgagaatgccaagattgccaaggaggcaaaggagtgcatgcaggagtgtgtcagcgagttcatctcgttcattaccagtgaagcttctgagaagtgccagcaggagaagaggaaaacggtgaacggcgaggatatcctcttcgccatgagctctctcggttttgaaaactacgcagaggccctcaagatctacctgtcaaagtaccgggagcaatcccagtccaaccggggcgagaaccaacagaacaggccgagcagccaaggctatggcgctactggcggctcaaaccctgctggtggttttggcgccggcctccctggccagcaagaaggcggggatactcagagctacaacctctacggcgctcagcccggccataacggtaccggaaccgaatattga

SEQ ID NO: 3275 - protein, 196 aa, Myceliophthora thermophilia
MSDSPQSNPKDVEQGAPSGDDEGQMNDPQDPHSTGLGYEFEVKEQDRWLPIANVARIMKTALPENAKIAKEAKECMQECVSEFISFITSEASEKCQQEKRKTVNGEDILFAMSSLGFENYAEALKIYLSKYREQSQSNRGENQQNRPSSQGYGATGGSNPAGGFGAGLPGQQEGGDTQSYNLYGAQPGHNGTGTEY

SEQ ID NO: 3276 - DNA, 666 bp, Myceliophthora thermophilia
atgggcagcacaacacaagacctgccctactggcaggtgaacgttcccgaacacttgagaactgccgagtgccccgacttcctccgcaacatctcggacaaggaccgcggcatcatcagcacgccagacagcgaatatcaacgtgactcgtgggccgtggtgcaacagaaggtggcacagaaccggctggagctgttccagagagtcccgtcggacctccgccgatacctggcctatacttggaagctcaggcaggactatggcagcgtcatgaactttatcctctccgagaggctcgggtggacgctgcccatcactccgagaggtcggccctttgagttcgacgacgacgtaaaggtgctgaggaatgactggccgtacggcatcgacgagcggatagtgcacctcgtcgtgtggaccaagtttgcgctcgaggaagacccggaaacgggcgacctgacggacgcggcgcgcgccgagatcgacgcctacgttcgcaagaaattctccaggatgcgtccggatcatgtcatctggttcaagaactgggcctccctcaagtccgtaaaatcggtggagcacttccacgtaatgctgtttgacccagatatggagtttgtcaacgagatcacgaacggcgacgtccctctgtgcgacagggaataa

SEQ ID NO: 3277 - protein, 221 aa, Myceliophthora thermophilia
MGSTTQDLPYWQVNVPEHLRTAECPDFLRNISDKDRGIISTPDSEYQRDSWAVVQQKVAQNRLELFQRVPSDLRRYLAYTWKLRQDYGSVMNFILSERLGWTLPITPRGRPFEFDDDVKVLRNDWPYGIDERIVHLVVWTKFALEEDPETGDLTDAARAEIDAYVRKKFSRMRPDHVIWFKNWASLKSVKSVEHFHVMLFDPDMEFVNEITNGDVPLCDRE

SEQ ID NO: 3278 - DNA, 5991 bp, Myceliophthora thermophilia
atggatcatggcagtccccaagacgagcctctttcgcgcttcggctcgtcttcagactcccttgaccatctcggcaattccgaccgccacgatcgcgatcacaatcacgatcaatcgcaccactcaccccgttcaacacggaaacagcaacagcttcagtactccgaccgcctcgccgacctgcgattgcactacgtcccagatccgcacagctcctctgctgatgttgatgcccccgaacacgatccacaagctcccgacgacgtggtagacccggccgatttctaccgcagttaccaaagcgtgcagcagcgcggaactgccgaaagagctggaagtgctgggaatgtctcctcgccggtgaaggaccccatggctccggccgtgataagcagcccccggcaaccgccctctctgcgttcgaacgggaacggaaccaccccgaaacaccctgccgtccccgtgtcgcaccgcaacgccctgcgaccgggccagcgttcgatttcgaacccggtagacagccgatccgggaatcttggaactggaggcacacggcctgcagccacagcagacggtcggcgtggcatagccggcagcactccgcccagcgtgaaggatctcaagaagaaatttgaccagcccgcatcccaatccgcttccggcacccggaagaccatcccgagggcctcaacgcgggacacagcctcgacgggcgccattgggaagtctcccggcgccgggagtggtgcaacctcgcagggcgcaccgaggacgtgggcgacacgagacacaggacgcgatcccgggaagggttctgggacgcggagcgcacagcgacccaagcccgctgctgaagaccaaggctccggcacttcgcaatcgtttgctagcaggatatctaggccgcgacctgtcggttccgccaccgcgaagccatccaagtccacggcgcaatccgccccgcatcgccagaacggcctcttatttggcgagatcctcccggagcagcacgactcggtcacacccgggttcggcatcgaatcggcccggcccaggacttccgagtccagcatttccgaccctgtgcggcgacaaatgaggaccctctcggatccggatatcgaaccgccctcgccaaccgattggtaccgggcagtctctcccccgactgcgcagcagaccacagatcgccatgcgtcgaacacaccacgaacccaacattctcgggcccacagcgaccttgccggatccaaactaaccttggcgcgtcctgactacggcgcgggcaggcctgacgccgaatttcccatatcacctacctcgccgacctcgccgacctcgcgcctcccgatacttgctaggagggtgaacgacgcctcgagccacggcagccccgtgtcgacccggtccaactctccttccaccttcggcaaacactccgcatcaagcgggagaacgtccaggcaacacgggccactggcttcgcgcgcgaggacgcctacgacgagctccgctcccaggttgtcaagcagaacctccagctccactcgcaagcctcctccatccaacctctccaccacccagtccagcagccggctcaatgcctacgtctccatcccacctccgaagctgtccccaaccctgcgaagctctcggccacgacagtcggttgccactgccacaaccgccgcgtcgagaatgcgagccgcggaaaggggcagctcccccctgaggcaaccacaacggcctgcctcccggacggaagatttgacctcccggaggcccaaggtatccgttggcgcgatcgacttcgcacaacggcgggaaaccatcaagctagcctacagcaagtccattcgggagacccaggcaagagaagccaggcaggccgccgcagagaagagaaagagagaactggctgccgtcgccgaagccaaagcagaggctgaggcggctacgtctacggccacggcggctgccaatgctgcggctgatgctgctccgacgccaccaaagacagccggcgggcatcgtgaggcgacggcggaacagaaagtacccgagatcgaactgcaacaggccgaaaaagggacgtcatctacggcccaagcaccaacagaggaattccatgctcggcctgattccctcaggttggaaattccgggcagttttccaggtagcgggtctccattgggcgaaccggacggagttccattttctgcggtttccatgacaagtgctgttaccgagtttgatacagaggtgcagaccgatccgcccaggcaggagattccgaaatcgagatctacggatgacgacgcaccggaaggggcggccgctccgagccaggccgagaccgcacctcaacctggtacgaccgagcaactgccggagcaaacggtcgccgcccctgctttgcacaggagagcatcataccggtccccgttcgatgacgagggcgacgaacaggatagcatctccatcaagatctctctggacccgtcatcgctcaccaaaccgcaagcctcgcccgaggtcacgccgacccgcgcgacctttgaatctcaaccggaaacccctcccgcccctcctccggtcgaggaagaagacgacgaatatgtgccgcggccgtacacgttctcagacaactacaagaccactgttaccatactgggcccagagcctgatttcaggccgtcgcacaaggagccgcctcgtgcaaccacatcccaaaccggcgtgtctcaagaagatgagcctcccaccaccagcgcccctgatattgtcgtccccgaggcttcgcgaatggggggcgcttgctttggcgagcctcaagtcgagattgagaacctggatcggatcgaggatttctataccgggccgcgcctgcgtgacaatatcgctgccctacgtgatccgactctggcatcgtccgatcctggcacgccttttgatgcacggccgccctcagccgagtgtcgaaggttgtcggacgcttcgcacaccctggctgttcccggactgctcgcccccgggaaccggtctagccagcactctgcatggactgatttctcgttcggtagcgaagatcgagacgctggccaccctagttctgcgtcacaattgcatagagcaggtctccatgacgacgggacgtcgttccgagctgtcccttccacgggcgatctcagtacatgtgcgtcaagcgttggagagctcgtgcaaagcccggaatcgccggcgctggaaagacctggcacttcatcgttctccacgattcctgagttggccggcggccagcagcggctccccgaacccgccaatgcagggaccttcacgccgcttagcaacgggtccgatacagggggggtagcgccacttcccgagcgtgaccctccccgaccgcccccatccgagcgcgggtatgagcgggatggcgcttttgatctcgcgcagagccgaccagggagctacgcatacagccacgaagggaaccttcccgaacccgtgtcgtcaccgcaatccctttcacagctccgccttgaccgagatccatctcgggtctcggtgggtgaggcgccgtatgatggacagatcccgctgacggagaaagagaaagaggagcagcaacggctccggcagaggcagctggtgattcgggagctcatcgatacggaggatgcttttgttcgagacatgaccgtcgtcgaagagatctacaggggcacggccgaggcgtgtccgaatctggacagcaagacagtcaaactgatcttcaggaatacggatgagatcattgcgtttcataccgctcttctcgccgagttcaaggagggcgccgcgagcgtgtacactcccaagggtaagcgctcgcctcagccaatgccagatggaaaggagtccgacccgacggccgcgaattacttctccttctctgccaacaggccggagaaggacgacgagaaggaccgcctcaccgccattggctcagtttttatcaagaacatcgagcaactcaaggcggtgcatgaggtatatctgagatccagcgacagctcttcgaagcgtctcgtgcagattcaggaagacgagactgtcatgctctggcttaacgagtgcaacgaggtggccaaggaactgaccagcgcctggaacctggattcgctcctcatcaagccgatgcagcgcatcacaaagtatcccgacatcatcacccacttgctcaagtacaccccggaggaccatccggaccgtgaatcgctcatcaatgcgcgggcacaagtaatcggggcgattgacgagatcaacaagaccaagaagaactttgagctggttgggcagatcgtcagtaatcggaagcgcaaagagtcggacgtgcggaccgggatagcaagagcgttcggaaagcgcgtcgacaaactccaggtctccgccgccgccaagcccgccgaagatagcgagtaccaaaggctccagcagcagtttggcgatgactacttgcggctccaggttgtgctacgagacgtcgagtactacaccaggaacgttgccacctacgtgcatgagtttctccagtacctctcctctatggagctcgtcatgcgcctccagccatccagggattatgcgcacctggagagcaaatgggtgcagttcaacgtatccatgagggacatcgagaagatcgccttggagagacatctcgccgatgttcggaaacatgtcattgagccctttgaacaggtcatcaggtgttatggcaacccctctctggccatgaagaagcgagccaaacgacgtctcgattacgaaaagtacgtggccctgaaagccaacggcaagaaggtggataagcagctcgccgagctggtggagcagtacgaggcgctcaatgacacgctcaagaaggagctgcccaagctctccgccatgacggccaagattggcaacatctgcctcggcaagttcatcagcatacaggcgtcctggttcgctatctggaaggagaaagtcaaggcgccgctctccgatgtcacgcatgttccggagatctccgagatcgtgtccagcttccagcgggagtttgcgctgcaggaggagagggccaaggcactcggtatcgtcaatcccgcgctcaagggcaggggatcccaatcaaccaccgacgactcctcgtccatccgctccaagactcgctcacgccccggcgacatcgtctcgccccgcagcaggggcttgtccatcaacagtgaccacgcgccggtcctaccaacgcccgacttcgtgaagcgcaacagcggacagtttagtctctctccggccagcagcgcccttcctagccccgccaactactaccgcgactactactcgggcatcaacaacaacaacaacaataacaacaacggcggcagcacgcgcggcagctccggatcgcctgtcacgcctgccgagtctacaggcacttctcgccccggcgtgggcgccggcttccctcccacgcgccccagcaccggccgcagctatgattcgaccagcctgccccggcagagctccgactcggccgccgccatgtcggtcagcaatcggcgcgattcaaactcaaccttcagctcgagctacccggcctatagcgccgccggcgaacagcagacgaggcgtctgtcgggcctgttcagctcggcgctgccgctgcccgacgcgtctgaggagaggagcgccagatcgtcgcgggcgtcgtcccgggacagaggggccaccggcaccggcggcagaggttataacgtgctctggctggcggcgtcgctgtttgagttcaacattgaagagaccaaacatgaggccgggtatccttatctgacttaccaagcaggggagatattcgatgtgattgccgaaaagggcgagctctggctcgctaaaaaccaggatgatccgcgcgacgtggtggggtggatctggtccaaacactttgccaagctggctgattcatga

SEQ ID NO: 3279 - protein, 1996 aa, Myceliophthora thermophilia
MDHGSPQDEPLSRFGSSSDSLDHLGNSDRHDRDHNHDQSHHSPRSTRKQQQLQYSDRLADLRLHYVPDPHSSSADVDAPEHDPQAPDDVVDPADFYRSYQSVQQRGTAERAGSAGNVSSPVKDPMAPAVISSPRQPPSLRSNGNGTTPKHPAVPVSHRNALRPGQRSISNPVDSRSGNLGTGGTRPAATADGRRGIAGSTPPSVKDLKKKFDQPASQSASGTRKTIPRASTRDTASTGAIGKSPGAGSGATSQGAPRTWATRDTGRDPGKGSGTRSAQRPKPAAEDQGSGTSQSFASRISRPRPVGSATAKPSKSTAQSAPHRQNGLLFGEILPEQHDSVTPGFGIESARPRTSESSISDPVRRQMRTLSDPDIEPPSPTDWYRAVSPPTAQQTTDRHASNTPRTQHSRAHSDLAGSKLTLARPDYGAGRPDAEFPISPTSPTSPTSRLPILARRVNDASSHGSPVSTRSNSPSTFGKHSASSGRTSRQHGPLASRARTPTTSSAPRLSSRTSSSTRKPPPSNLSTTQSSSRLNAYVSIPPPKLSPTLRSSRPRQSVATATTAASRMRAAERGSSPLRQPQRPASRTEDLTSRRPKVSVGAIDFAQRRETIKLAYSKSIRETQAREARQAAAEKRKRELAAVAEAKAEAEAATSTATAAANAAADAAPTPPKTAGGHREATAEQKVPEIELQQAEKGTSSTAQAPTEEFHARPDSLRLEIPGSFPGSGSPLGEPDGVPFSAVSMTSAVTEFDTEVQTDPPRQEIPKSRSTDDDAPEGAAAPSQAETAPQPGTTEQLPEQTVAAPALHRRASYRSPFDDEGDEQDSISIKISLDPSSLTKPQASPEVTPTRATFESQPETPPAPPPVEEEDDEYVPRPYTFSDNYKTTVTILGPEPDFRPSHKEPPRATTSQTGVSQEDEPPTTSAPDIVVPEASRMGGACFGEPQVEIENLDRIEDFYTGPRLRDNIAALRDPTLASSDPGTPFDARPPSAECRRLSDASHTLAVPGLLAPGNRSSQHSAWTDFSFGSEDRDAGHPSSASQLHRAGLHDDGTSFRAVPSTGDLSTCASSVGELVQSPESPALERPGTSSFSTIPELAGGQQRLPEPANAGTFTPLSNGSDTGGVAPLPERDPPRPPPSERGYERDGAFDLAQSRPGSYAYSHEGNLPEPVSSPQSLSQLRLDRDPSRVSVGEAPYDGQIPLTEKEKEEQQRLRQRQLVIRELIDTEDAFVRDMTVVEEIYRGTAEACPNLDSKTVKLIFRNTDEIIAFHTALLAEFKEGAASVYTPKGKRSPQPMPDGKESDPTAANYFSFSANRPEKDDEKDRLTAIGSVFIKNIEQLKAVHEVYLRSSDSSSKRLVQIQEDETVMLWLNECNEVAKELTSAWNLDSLLIKPMQRITKYPDIITHLLKYTPEDHPDRESLINARAQVIGAIDEINKTKKNFELVGQIVSNRKRKESDVRTGIARAFGKRVDKLQVSAAAKPAEDSEYQRLQQQFGDDYLRLQVVLRDVEYYTRNVATYVHEFLQYLSSMELVMRLQPSRDYAHLESKWVQFNVSMRDIEKIALERHLADVRKHVIEPFEQVIRCYGNPSLAMKKRAKRRLDYEKYVALKANGKKVDKQLAELVEQYEALNDTLKKELPKLSAMTAKIGNICLGKFISIQASWFAIWKEKVKAPLSDVTHVPEISEIVSSFQREFALQEERAKALGIVNPALKGRGSQSTTDDSSSIRSKTRSRPGDIVSPRSRGLSINSDHAPVLPTPDFVKRNSGQFSLSPASSALPSPANYYRDYYSGINNNNNNNNNGGSTRGSSGSPVTPAESTGTSRPGVGAGFPPTRPSTGRSYDSTSLPRQSSDSAAAMSVSNRRDSNSTFSSSYPAYSAAGEQQTRRLSGLFSSALPLPDASEERSARSSRASSRDRGATGTGGRGYNVLWLAASLFEFNIEETKHEAGYPYLTYQAGEIFDVIAEKGELWLAKNQDDPRDVVGWIWSKHFAKLADS

SEQ ID NO: 3280 - DNA, 2529 bp, Myceliophthora thermophilia
atgggcttctcgaagaagccgaccgacaaccgcaccgccgactctacccctgcgtccgcgtctgcccccgaggatccatcgtccaacagcagcggctccttcttttcgcgcctcacccttcccctccggccgcgtactcgctacatcgccgacttccacatccggccggccgagccccatcgcaactatggcgccggtgaccaggtgaagggcgccgtcgtcctgaccgtcgtcaagcccgtccgcatcacccacctggtcgtgtcgctccacggctacatgcgcgtctacaagggccccaacgtccccgcgaacgagcccataatcgatcccgccgaacccctgtccacgtcgagccgcggttcgcgccaaaaacatcacggccatggttatgtaagattgtttcaggatgagcaaaccctcagcggcgatgggcggctcgacccgggcaaatacgaatttcacttcaacctcctctttccgtcgagcggcttgccgagcagtatagatttcgagcgcggcaccatctcgtacatgatcacggcaaccctgacgcgcccgacgtcgataggaagcaaaacatcacccaagaccagctgcgaacgaaaggtttacctcgtcgagcagctcgacattgggaacctcgccccgccacggccgcgaaccatctatctcgaacccatctccaaacgatccaagaggaagaggcagcctgttgtcggggagaagtgctccgcgcctcccgagccaccggccccggtgtccgatccggattcggctcgcgcgaatgaaaattctaccgaaggttccttatccgtaattggcgatgacttggagcaggacgcgacatccaacagcaccaacccccggaacctccaaagcgatgttcggagcgtgagcagcgaaagcgccgtcagtggctgcaccgctcagagcagaaccggggagacgaatactttcgtaccaacggcccctccaatggccgggaaaaagggccccactgtgaaggagcggaccattacagccaccatcgagctgccaaaggggggttgtcttcgtggagacgtggtgcccatcaagattttcgtacagcacatcagacggatcacaagcctgcacggggtcatcgtcacgctgtacaggcttgggcgcatagattcgtcgccgccctcgttgtccaaagatctgccggaaggaaaggctcggcgtctcgagaaggaggactattacccccggtccaagacaggactgggcggcctctctctgacgtctgctgggtcctgcagcgtattccgaaaagacctatctcaggcttttgcgcctctcatcattgatccggacaccttgactgccagtctcacggcgtcagtgcgagtgcccgaggacgtcttccccaccatcaagggcgccccttacgatatgatttcgttcaagtaccacgtcgaggtgattgtcgatctcggaggtaagctggctagccagcttcacgccatcaagggatctggcacgaggatgagtcccgtggcgggacctctcggcgtcggcggcaacccatacgagggcacccatgcagcaatgacaacttggggcacgaacatcatcgacacggacagccttcggcgccagaagggcgtcatatgcgtcgtgtttgaagtcgtcgtgggaacggcggacagcagccggttgcgcgccaaagcgccaatgaaaccagccccttccgtccattccgtgtcggttcaagaggccgaggttcacgaccgtgacacgcacggaaaacagccctcgccggctgatgcaggtctcgacagtagctacccgccagaagaccgtgctcaggactacgttccgtctccccacgccccgccgcaccaaccctacccttactgggacgccgtctcaccgcaacctccaccagttactccctacattcctcctccagacattccggacgaagcaagccttacggagaaggagcgcataagactggcggaacagcgattacttcccagccaaccgcccgaagcttcggtcgcaagctcctcgacttcccactttgtccacggcgagaatatttacgatgccgacgaccaattcccgacgcccatggagggcccctcgcatgcctcgcatgccacaaccacacccaatttaacgcagcaacatctcttcggtgcaccgtcggcgccgacgctagaggacctctctcccgccccggagggcgctcacgcgacagaagacaagcaggagctcgagagacgaaggctgctcgccgaagccagcgcgccgccagagtttcccgaagattacgatatcggggggagcggcggcggcggcgctgccgcggggccaagcgctccctcggcacccgatcttcagccgtcggcgcccatcctggaggatgaggactcgtatggcccgcattacgcttacggctcggcggcggcggcggcggcggctgagactgccccagctccgatacatggccacgttgcacaaccagaggagccgttgccaaagtatgaacggtga

SEQ ID NO: 3281 - protein, 842 aa, Myceliophthora thermophilia
MGFSKKPTDNRTADSTPASASAPEDPSSNSSGSFFSRLTLPLRPRTRYIADFHIRPAEPHRNYGAGDQVKGAVVLTVVKPVRITHLVVSLHGYMRVYKGPNVPANEPIIDPAEPLSTSSRGSRQKHHGHGYVRLFQDEQTLSGDGRLDPGKYEFHFNLLFPSSGLPSSIDFERGTISYMITATLTRPTSIGSKTSPKTSCERKVYLVEQLDIGNLAPPRPRTIYLEPISKRSKRKRQPVVGEKCSAPPEPPAPVSDPDSARANENSTEGSLSVIGDDLEQDATSNSTNPRNLQSDVRSVSSESAVSGCTAQSRTGETNTFVPTAPPMAGKKGPTVKERTITATIELPKGGCLRGDVVPIKIFVQHIRRITSLHGVIVTLYRLGRIDSSPPSLSKDLPEGKARRLEKEDYYPRSKTGLGGLSLTSAGSCSVFRKDLSQAFAPLIIDPDTLTASLTASVRVPEDVFPTIKGAPYDMISFKYHVEVIVDLGGKLASQLHAIKGSGTRMSPVAGPLGVGGNPYEGTHAAMTTWGTNIIDTDSLRRQKGVICVVFEVVVGTADSSRLRAKAPMKPAPSVHSVSVQEAEVHDRDTHGKQPSPADAGLDSSYPPEDRAQDYVPSPHAPPHQPYPYWDAVSPQPPPVTPYIPPPDIPDEASLTEKERIRLAEQRLLPSQPPEASVASSSTSHFVHGENIYDADDQFPTPMEGPSHASHATTTPNLTQQHLFGAPSAPTLEDLSPAPEGAHATEDKQELERRRLLAEASAPPEFPEDYDIGGSGGGGAAAGPSAPSAPDLQPSAPILEDEDSYGPHYAYGSAAAAAAAETAPAPIHGHVAQPEEPLPKYER

SEQ ID NO: 3282 - DNA, 3300 bp, Myceliophthora thermophilia
atgggcaacgttagcagcgtgcccgatgagggcgcagctctctatcttaaagatcagaatcgctctaatcccaaacggcgcaccgcaataaacatcgttccgaatgcattcccggctacaagagtatccccatcgcggtcttcaggcgaccttaccccaatcgagttcgtcctggaccccgaaccacccagccacggtgctggtccttccttcttgttgaagctcgccaacgatgacgagctcgtcttcacattcaccttcatcatccgccgatcacagagcgtcgtccacaatccggtcggcggcgttgataccgtcaccccaatagatacccagatcaacggcctgacctttgtctttgcgtcaacaccccgcgaagtcgagaacctggtaacccgcgagttccatgccgatccaaatcttcacaagaatgccaatgtcgcgctcgttgggagctactcgaccgaaggcagcccctcagtgacgttcgactggacatggcgctggaaaccacccaagcataccgaagaccgcggcggcggctggaggaattcatgcagcgtcggtagccttaagctcctaccattcgctacaattgctgatatcagccacagttcgtcgaacacctcgtcccacctgagccaacccaactccccgactcctctactccttagcgctccgcccaaagtccgtgttgtgtctgcgcagtctctcgagtctcagatcagtaccatcccagaacatgaagagattgcatcaccacaacatgttggcagcgaaccgagtaacgccccgcctcctgcgccgccagctccgaaagagccgatcaaggtcgatgtctcttgcccgcgaccaggagaggacctgaccttgccagacgatggaccggttttccgtgccaccatgaaggccctggaacagaagacgggcaacatgcggatgcagatgaagaggttgatcaaaaaagccgaatacgtgtatcagacgcaacaagaggccaatgacgcctttgcttctttcatggatgctctgaaggaggtgtcggcaaccaacgcgaacgctgtccagcccgccatcgagcactacttcgacaagatcgctcgcgagatcctgtcgtacgagcggcagaacaccacaaacatgcaaaagatcgtcatagacccggtgaacaagctctaccaaatggacatcaagcaggccgaggctaagaagcgcgactttgaagaagagagcaaggagttttacgcctacgtcagccggtatttgggccagcggcatgattcggtaaaggcgaagcagagcgactccaagtaccagacgaagcgcaagaactttgagctcaagcggttcgactattcgtctttcatgcaagacctttccggcggccgcaaggaacaggagatcttgtcccacctcaccaaatacgcggatgcgcaagcgaaatgcttcctaagcaccgcgaagcgggttgacgagctgatcccacagctcgaagcgctctctacggaggtccaggaggcggataaggagtatcaataccaacggcgggagcgagaggaaaagaggaggcttctggagaagagcaactccgcgtatgccgagcctgagcagcccttgactgcgtcaggacctgtcctcgccggcggtcactcaaacgggactcagccgaactcggaaaccgagatgggccgcgcagacagcactggctcgcagctcaggccgactcgttccatcaactcgagcaactctcccagcactgcggacttatccaggtctaccggcggcctcggccagcaagccgtcaccagccccgcccataacagcaagttcaagggcatccgtgacctcgaggagcgggaccccaaccaggcgatacagtccgataaggatgcgccgaatagaaaagaaggtctgctctgggccctcaaccgtcccggcggtcatgtcgatccgcggaatctaaacaagcagggatggcacaagttctggatcgtacttgaccaaggaaagctgtcagagtacagcaactggaagcagaagcttgatctccatatggaccccatcgacctgcgtcttgcttcggtacgggaggctagaaacgcggacaggcgtttctgcttcgaagtcatcacgccccaattcaagcgcgtctatcaagctacatccgaagaggacatgtatagctggataacggcaatcaacaacgcgctgcagagcgccgtcgagggccgaacgttcaaggacaagccttcgacggcccattcagacctgggcttcaatggcgtggatatcggctcgatgctggtgggcaaaagctcgtctgtcagccacggcagtcactcaagcagcgccatcccattcaggcgaacaactgtcggcgctcggcctagcacttcgcgtggcgccaatttcgaggacaagccggataagcttttgcagatgctgcgcgagaacgaccagggcaattgctggtgtgccgactgcgggtccagcaacaaggtcgaatgggtttcactcaacctcgccatcatagtttgcatcgagtgcagcggcatccaccggtctctgggaacccatgtcagcaagattcggtctctgacactcgacacgacctcgttcacgccggatatcatcgagctgcttctcctggtcggaaatagggtttccaacatggtctttgaagccaggctggacccagccatgaagctgaccccccaggccaaccgggagcagcggctcaagttcatcagcgccaagtacgtcgagcgcgcctatgtcgagcccatctcggcaaccctgtcaaggttcgccacgccggaagaaacccttctcgccggcatcaagcgcaacgagatccagcagattctctacgccctggctctccgggcgaatcccaacgtgacggacaagtcccgtggcactcacgccatctacttagccctcgcggcagcagacccagcgccaccctcaccggtcccatcgcagtccctagcccctcagacgccaaccgtcgagcgcgtggtgcccttcccggtagccgagctcctcatccagaacggcgccgagatcccggactcgctaccccaagtgcccctcagcatggctgcgcaggcctacatcgaaatgaagcggggccgcaaagccgccattgacgggtccgggtcgtacgactcgtcgccgagcgctgccacggccatgtcgagccagaacgacaaggtgcagcgggatcgcgactcgcggctgcagaagcgcgtcagcgccggcggcaggctggccaagacgccgattcccgaacgctag

SEQ ID NO: 3283 - protein, 1099 aa, Myceliophthora thermophilia
MGNVSSVPDEGAALYLKDQNRSNPKRRTAINIVPNAFPATRVSPSRSSGDLTPIEFVLDPEPPSHGAGPSFLLKLANDDELVFTFTFIIRRSQSVVHNPVGGVDTVTPIDTQINGLTFVFASTPREVENLVTREFHADPNLHKNANVALVGSYSTEGSPSVTFDWTWRWKPPKHTEDRGGGWRNSCSVGSLKLLPFATIADISHSSSNTSSHLSQPNSPTPLLLSAPPKVRVVSAQSLESQISTIPEHEEIASPQHVGSEPSNAPPPAPPAPKEPIKVDVSCPRPGEDLTLPDDGPVFRATMKALEQKTGNMRMQMKRLIKKAEYVYQTQQEANDAFASFMDALKEVSATNANAVQPAIEHYFDKIAREILSYERQNTTNMQKIVIDPVNKLYQMDIKQAEAKKRDFEEESKEFYAYVSRYLGQRHDSVKAKQSDSKYQTKRKNFELKRFDYSSFMQDLSGGRKEQEILSHLTKYADAQAKCFLSTAKRVDELIPQLEALSTEVQEADKEYQYQRREREEKRRLLEKSNSAYAEPEQPLTASGPVLAGGHSNGTQPNSETEMGRADSTGSQLRPTRSINSSNSPSTADLSRSTGGLGQQAVTSPAHNSKFKGIRDLEERDPNQAIQSDKDAPNRKEGLLWALNRPGGHVDPRNLNKQGWHKFWIVLDQGKLSEYSNWKQKLDLHMDPIDLRLASVREARNADRRFCFEVITPQFKRVYQATSEEDMYSWITAINNALQSAVEGRTFKDKPSTAHSDLGFNGVDIGSMLVGKSSSVSHGSHSSSAIPFRRTTVGARPSTSRGANFEDKPDKLLQMLRENDQGNCWCADCGSSNKVEWVSLNLAIIVCIECSGIHRSLGTHVSKIRSLTLDTTSFTPDIIELLLLVGNRVSNMVFEARLDPAMKLTPQANREQRLKFISAKYVERAYVEPISATLSRFATPEETLLAGIKRNEIQQILYALALRANPNVTDKSRGTHAIYLALAAADPAPPSPVPSQSLAPQTPTVERVVPFPVAELLIQNGAEIPDSLPQVPLSMAAQAYIEMKRGRKAAIDGSGSYDSSPSAATAMSSQNDKVQRDRDSRLQKRVSAGGRLAKTPIPER

SEQ ID NO: 3284 - DNA, 2916 bp, Myceliophthora thermophilia
atggcgcgccggaagggcaatggctcccgggccgcgagcggggaggcatctgcggccccacggtcccggagacaaggggcatcagcatccctgactcaggagcccaggagggagccgaagtcacagccaaagcaaaagaaaaagccagctgatctggacaatagtccgacagcaaggacggagcagcggcctcgggataagcccaagactagcggcaaaccacgtcgcagtaggcagcccgaacctgcagctgagaagaagacgaccgtcaaagtcgagagcccggcaaatgattcaaatctccaacccttcatgaacgggcgccgaaaggacaaaaacgcggcagctccagcacgcaacccccagacagccaagccggagccccctgaaggttggtctcgtcctagccacctgcaggccaggaagatctactggccgagacatgctcaaaagacggtcaccgacggctctgagtccggagacatggcagcccgtgctgttctgccttgggtcgtggaccccaactatcctaagccattgaatcgatattgtgccttcaactatggccggccggcctggcactccttgcttggcaaggacatcgcagagcagttccgaaaggagtttgcgaggagccgcaacctcgagttccgccggatcatggaccaggaggaactgaaaaatctgcaccgaaagttctggaaagtgggcgagccggccacgttcaaggccaaaatggcgtaccccagagaccgcggcacgccaaggctcttcattgtgtcttcggcctctgacgacgatgctggcacgataaacccagccaacgatcggtccgttgtaatccgacttctccaagtcaccgagctagcccagagggtactcaacttcatcagcccgagcatcggcgacatcaccgccctggccatgacgtgcaagcgcgcggccgcattgacgcgtgcgagctatgacttttgggacttcaaccttggctcctttcctaccgacgattatgtcgagaaacgagacggtcgtgaccgcgtcctccagggcgacggggttcggtccaccaccttgatcatcgccccggcatcggacgagccaaagaaccaagagaaaccttatatggctgacttcaagaacatgctgcggctttgcgtcgccatcaccgagattccatcgaccttctcttccataatcatcgaccggctccagttttttgacctcgccttgtttgagatgatggtcaataccatgccgaacctaaaggtggtcaccatcacccggtgccctatgttggacgtcaccaagttgagaccgttgctggagctcatcaagcgccacccgcttcgctcgggcaccggcaaggggtctcgcgatccccccgacgactcctggactcacaaggctgcacagagcccacctcccctcgtgccagccacacaagtcgatgctccacagggatggggcgagtcgccagaacggggcgccaaagcatacatccgcctcgacttcttccctttctttttccacgggcccccgtctggtcctcgtctgggctcctatggggtgacacataatgagccaaccttcaatacccccaaggccgtcttcgccttgattctgcaatgccaggaccttgccaaagaggtcggcttggacctgctcagcgacagctcctccttctggagcttcatccgtcagctacctgggccggacgttctctgggctctgaaagcccgggaggccgtgatcacgcgtgagcgcgagctcgccgagggcaaaaaaacgaggaaggaaattgagaacgacttcgccgacgaccttactgccgctctgacaggcgacaaccagaagcatccaaaggtaccccccgccatgatgaggtacctgccttccagctttgagacgaagggcaagtactggcgccaacaggaacggtgcggaatgtgccgcttcacctacccggtctccctcttcccccttcggcgggacgcctgctggagctgcaagatgacgctattcgttctgaacatggaagacagccatctccggctctggcaagagacggctctaaaacattggcgtatcggccttgacccggcgtcggataagctggaccagctgctcgcaaacgggcccgtagctctgtccaaggctttttacgaagtgcagtatgcggactggacgtgggaatactttctcaactttgccccggaacccgaccttggccccgaagggaaggccaacggcaacgcatccgtggatgactgggcgacaggtacagagcagaaggttccgtactgccctccaacccccaggagtctcgaccctactcgcgcttcactggcccgctggcggtgggcccatagtccggccaccaaggccttcgattacagagagggcggaccgcagcgtgcacacccctgcatgttcccgttgagcccttcgaacgttcaggactgtgactttggcgcggaggagaaggagcatttcaacaggcgctgggtctggagttggttgagcgagaatcttctcatccgtgtcttgatagagactcgccgtgaaacgcgcgcaagaggtggccacctcgagcgaccagacgttgacgaaagcaaccaccggcatccgtttattcagaaacagctggatcgcgcccgccgagatcccgcccggcgcgccgttgtccgcgacagggaacggcgtctccaaaacaaacaagacaagaccgtgtacatggatcagctcgcccacgtcgaagactgcctgcactccatgtcgaccctggctcgcaagccgttcaacattgacaagcctattcccgacccggctctcgaccgggctgcatacaagaagctgctggaggaagagtcccgcttgcccggctatggcttcagaaggaacggcgagtggcagtaa

SEQ ID NO: 3285 - protein, 971 aa, Myceliophthora thermophilia
MARRKGNGSRAASGEASAAPRSRRQGASASLTQEPRREPKSQPKQKKKPADLDNSPTARTEQRPRDKPKTSGKPRRSRQPEPAAEKKTTVKVESPANDSNLQPFMNGRRKDKNAAAPARNPQTAKPEPPEGWSRPSHLQARKIYWPRHAQKTVTDGSESGDMAARAVLPWVVDPNYPKPLNRYCAFNYGRPAWHSLLGKDIAEQFRKEFARSRNLEFRRIMDQEELKNLHRKFWKVGEPATFKAKMAYPRDRGTPRLFIVSSASDDDAGTINPANDRSVVIRLLQVTELAQRVLNFISPSIGDITALAMTCKRAAALTRASYDFWDFNLGSFPTDDYVEKRDGRDRVLQGDGVRSTTLIIAPASDEPKNQEKPYMADFKNMLRLCVAITEIPSTFSSIIIDRLQFFDLALFEMMVNTMPNLKVVTITRCPMLDVTKLRPLLELIKRHPLRSGTGKGSRDPPDDSWTHKAAQSPPPLVPATQVDAPQGWGESPERGAKAYIRLDFFPFFFHGPPSGPRLGSYGVTHNEPTFNTPKAVFALILQCQDLAKEVGLDLLSDSSSFWSFIRQLPGPDVLWALKAREAVITRERELAEGKKTRKEIENDFADDLTAALTGDNQKHPKVPPAMMRYLPSSFETKGKYWRQQERCGMCRFTYPVSLFPLRRDACWSCKMTLFVLNMEDSHLRLWQETALKHWRIGLDPASDKLDQLLANGPVALSKAFYEVQYADWTWEYFLNFAPEPDLGPEGKANGNASVDDWATGTEQKVPYCPPTPRSLDPTRASLARWRWAHSPATKAFDYREGGPQRAHPCMFPLSPSNVQDCDFGAEEKEHFNRRWVWSWLSENLLIRVLIETRRETRARGGHLERPDVDESNHRHPFIQKQLDRARRDPARRAVVRDRERRLQNKQDKTVYMDQLAHVEDCLHSMSTLARKPFNIDKPIPDPALDRAAYKKLLEEESRLPGYGFRRNGEWQ

SEQ ID NO: 3286 - DNA, 1068 bp, Myceliophthora thermophilia
atggagccagcaacaccccaacatggcgctctcaagccctttccggagactgcttccgctccggtacacttgaagcccagggtagcagcattggatgcggttgaggacatactatacggttctatcgccggcgtggtgggcaaatacattgaatacccctttgacacggtcaaggtccggctccaatcccagcccgaccacctgcctctccagtacaaaggaccactggactgctttcgccagtccgtccgcgccgacggcttcctcggtctgtaccggggcatcagcgcgccgctcgtcggcgcagccctcgagaacagcagcctcttcttctgggagcgcctcggccgcgccgccatctacgcctccggctacagcccgcgcgaccagccgctgcccctgtcggccctctggataacgggcgccttctccggcaccatgacctcgttcgtcctgacccccgtcgagctggtcaagtgcaagatccaggtgccgcgcgaggcggacaacggcagtggcagtggcagtggcagtggcagtggcggcggtggaagcgcggccaaggcggccccgctcaggccgatatcggtgatccgggacatttggcgacaccagggcctgcgcgggttctggcacggccagctgggcacgctgatccgcgagtcgggcgggtgcgccgcctggttcgggtccaaggagacggtgaccaagctgatgcgggagtggaacgtgcgggcggcgcggaccgaggaggagcgggcgagggcgcggcaggcggacgccctgcccctgtggcagcaggccgtggcgggcgcctcggccggcatgtcgtacaacttcctcttcttccccgccgacacggtcaagtcgcgcatgcagaccacgccgctcggcggcagcgctgcgcagcagaggacctttgccggcgaggcggccgcgctgtggaatcaggccggcctgaagggcttctatcgcgggtgcggcattaccgtcctgaggtcggtgccgagctcagcgttcatctttatggtctatgatgggttgaagaagtatctacccatgcaataa

SEQ ID NO: 3287 - protein, 355 aa, Myceliophthora thermophilia
MEPATPQHGALKPFPETASAPVHLKPRVAALDAVEDILYGSIAGVVGKYIEYPFDTVKVRLQSQPDHLPLQYKGPLDCFRQSVRADGFLGLYRGISAPLVGAALENSSLFFWERLGRAAIYASGYSPRDQPLPLSALWITGAFSGTMTSFVLTPVELVKCKIQVPREADNGSGSGSGSGSGGGGSAAKAAPLRPISVIRDIWRHQGLRGFWHGQLGTLIRESGGCAAWFGSKETVTKLMREWNVRAARTEEERARARQADALPLWQQAVAGASAGMSYNFLFFPADTVKSRMQTTPLGGSAAQQRTFAGEAAALWNQAGLKGFYRGCGITVLRSVPSSAFIFMVYDGLKKYLPMQ

SEQ ID NO: 3288 - DNA, 1764 bp, Myceliophthora thermophilia
atgggctccctggtggacatagttaccctcgagaacctcgagcagaagttgttccgatgggacccgtccagttcgagtcacttgtatgctttggtcgacatgggaagcaatggcatccggttttccattgcagacctttctcctccgcgagcgcgacagctcaggtgcatctatcgggaacgcgccgctatctcgttatttgatgcgcttggcgggccatcgttgctcttccccgaggagacgattaagctagtctcgcaaacactggcaaggttcaggtctatcgccgttgacgactacgacgttcctcctagccaaatgagaatctttgcgacagaagcgatgcgtcgggcagaaaacgccacgaccatgcttgaggccatacggtctgcctgtccgggtctgcccgtgtacgtccttgcgccaccggttgagacgctctttggctcagtgggagctcgttctggcttcgtcgatgtgaaagggctttttcttgatcttgggggaggaagcgtccagatgacgtatctggacacctatgcccgtcctcgagagagcagcacgagtccagaggtcgccgcagccctcgccgggcagagcctgccctttggcgcggcccatctaactagtgttctggacagcagtgacgccgagacacaagcgtcagagatttctcgtctccgcgacagcatgagcgaggctttcaggacattgtgcgccaagtttccttcacttgccacggacgccgccgaggcccaacggggcaaagctggggagggtgaagcaacggcggggattgacgtctatctttgcggtgggggctttcgaggctacgggagcatgctgatgaacaggcatccgatacagccgtacccaattccatccattggggggttcacggtgtccggtcatctattcgggcggaccaaagacttgctcgattcccccgccatagtggctgtggtcgacgcgctcatttctgctgttcctcgaattcgctccgtcaccttctgctctggcggcaaccgtgaaggcgccctgatgatgagcttgccgacggaaattcgacacagcaatccattaagtcactgcgggctcgtcttgaggaaacacgtgccttttcagcccgtcccagacgcggcacctgttgaagtggttctcgatgcgttacgatccgctttcccgccagatttgaacttggctagcacgactacgatttttggcttacgcattgacgccctctatgctgagcagatatggagccagctgggatgcgacgccgagacaaatgcgtctgctgctttgcataatgcgatcagttatcctgatctgcccgggctgacgcacctcgcccgcgccgtgctgggtgtcacaacctgtgccaggtggggcgcgagcttagcacccgttgatgagccgctctacaagaacctacgggctctgatggatgctgcagatccagacgcgacgttttgggccgattatactggctctgtgacctcagcgatggcagcaatcgtgcgaggatggccaaaggctcgaggtgccatccaggataaaatcaggttccgggcaacggcacagcatcataatcccatccgggttcagctggaaatctcggtaaatccggacgcggcgatgggagttggccccgacgttatccacgagactttcaggggtctaaagaagcaccgacgctcagggagagaagtctccgtcaccgttcagccactcgtgaaagagagttcggtgctctcgggttga

SEQ ID NO: 3289 - protein, 587 aa, Myceliophthora thermophilia
MGSLVDIVTLENLEQKLFRWDPSSSSHLYALVDMGSNGIRFSIADLSPPRARQLRCIYRERAAISLFDALGGPSLLFPEETIKLVSQTLARFRSIAVDDYDVPPSQMRIFATEAMRRAENATTMLEAIRSACPGLPVYVLAPPVETLFGSVGARSGFVDVKGLFLDLGGGSVQMTYLDTYARPRESSTSPEVAAALAGQSLPFGAAHLTSVLDSSDAETQASEISRLRDSMSEAFRTLCAKFPSLATDAAEAQRGKAGEGEATAGIDVYLCGGGFRGYGSMLMNRHPIQPYPIPSIGGFTVSGHLFGRTKDLLDSPAIVAVVDALISAVPRIRSVTFCSGGNREGALMMSLPTEIRHSNPLSHCGLVLRKHVPFQPVPDAAPVEVVLDALRSAFPPDLNLASTTTIFGLRIDALYAEQIWSQLGCDAETNASAALHNAISYPDLPGLTHLARAVLGVTTCARWGASLAPVDEPLYKNLRALMDAADPDATFWADYTGSVTSAMAAIVRGWPKARGAIQDKIRFRATAQHHNPIRVQLEISVNPDAAMGVGPDVIHETFRGLKKHRRSGREVSVTVQPLVKESSVLSG

SEQ ID NO: 3290 - DNA, 621 bp, Myceliophthora thermophilia
atgtccctgacagaggcaaccgccaacccccctccttcccaggagaactcttttccgccccctgtcctgaccctcagcaaatgcatcctccgccccatccacccaatggatgcgccggccatccagcgcgcgtgtaactcgcccgtcatggccaaatacatgtcgtaccgcttcccgtcgccatataccattgaagatgcccaccggtggattgggatagcttcgtcctttcgggtacccggcagcccggacatcctgccttcgctggttatctgcgacccggccaccaacgaggtggttggctcgatcgggatcaagaccaaggaggacgttgaagaattcagctttgagatcgggtactggatccgcgaggcgagctggggcaagggaatcatgaccgaggcatgccgggcgtactgcaagtggttgtttgagatgtatcccaaggtgaaccggttagaagcggacgtgtttgagggtaattatgcgagcgtgaaggtgctggagaggtgcgggttcgtacacgaagggaccaagaggaaggcgggtacaaagcatgggcgggtgtttgatatttgggtgtacgggttgctgagggaggaatgtgaacttctgaactag

SEQ ID NO: 3291 - protein, 206 aa, Myceliophthora thermophilia
MSLTEATANPPPSQENSFPPPVLTLSKCILRPIHPMDAPAIQRACNSPVMAKYMSYRFPSPYTIEDAHRWIGIASSFRVPGSPDILPSLVICDPATNEVVGSIGIKTKEDVEEFSFEIGYWIREASWGKGIMTEACRAYCKWLFEMYPKVNRLEADVFEGNYASVKVLERCGFVHEGTKRKAGTKHGRVFDIWVYGLLREECELLN

SEQ ID NO: 3292 - DNA, 1782 bp, Myceliophthora thermophilia
atggccgacacacagaagcccgccgaggtgccgcaggagactcccgccaccgagcccgccgccgagaccaagcccgccgaggctactgctgccgccgccgagactgaagccgctcccgccgccgaggccgcccaggcggccgctactgagacccctgctgccgccgccaccaccgagacggaggcggctgctgctccggccgaggaggccaagaaggatgaggaggccaagaaggaggagcctaagcctgttgaggagggccacctcgagcacaagggccagggcgccaacttccccaagaactttctctataccaagcagctcttctggttcggttccgagcccgtcgacctgaagtcgattgcctccttcaaggccgacaaagtcaccgacgttgctcatcatgtcactgcttgggctgccgagaccggcaagggcctgctcttctacagcgagaagggcgacaaggctgccccccatggtgctatccacctggccgacgcttcggagcctgccgttgatggccccaacaagttccacttcactgccaagggccacaagcacaccttcaaggcttccagcaccgccgagcgtgacaactgggttgcccagctgaagaccaagatcgccgaggccaaggagcttgctgctaccgtcaccgagtccgagacttacaagaagacccttgagagcctcaagcccgctcccaccaagaaggaggagaaggctcctgctgccgagacggtcgctgccgagcctgccactaccaccaccgaggaggctgctcctgctgccgaggcccccgctgccgaggccgccaaggaagagcccaggaaggaggaggacaaggctgagaaggaggagcccaagcgccgctctgccagccgcaagcgcgcttcgatcttcggcaacctcctcggcaagaaggaggagaagaaggccgctgagactgaggccaagcctgtggaggaggccccggccgccgagacgagcgccgcggctgagtcatctgaggcccccgctgctgaggctgctactgaggctgccgcggagcctgccactgaggctgctgccactaccgaggctgctgccgaggctaagcctgaggagcagaccgaggaggccaaggagggcgagaagaaggaggagaagaaggagactactgaggcccgcccggcccacgcaaagcgcaccagcatcttcagcaacctctctttcggcaagaagaagaccgctgctcccgccgaggctcctgccaaggaggcgcccgccaccactgaggctgtcgctgagaccgctcctgtgatcccggctgtggaaaccacggagcccctctctgccgaggtgtctgcccccgcgaatgcccctgccgagacgaccgagggcgcccctgccaccaacggcgagaccaagaaggaggtcaagtctgagaagcgcaagagctcgctccccttcgccttcggcaagaagaaggatgctgcctcctccgatgaggaggccgagaagcccaagtcgccttcggctttctccaagctgcgtgctaccatcaagggcaagggcaaggctgagaagcctgagaagaccgaggagactcccgccgccccggctgccgagacggaggctggtgaggctaaggctgaggctaaggctgaggagcctgccgccgaggaggctgccaagcccgctgaggctgagaccaccgctgccgcccccgccgctgctgaggaggagacccctgccaagcccctcgagtccactccggctgtgactgctgccgcttag

SEQ ID NO: 3293 - protein, 593 aa, Myceliophthora thermophilia
MADTQKPAEVPQETPATEPAAETKPAEATAAAAETEAAPAAEAAQAAATETPAAAATTETEAAAAPAEEAKKDEEAKKEEPKPVEEGHLEHKGQGANFPKNFLYTKQLFWFGSEPVDLKSIASFKADKVTDVAHHVTAWAAETGKGLLFYSEKGDKAAPHGAIHLADASEPAVDGPNKFHFTAKGHKHTFKASSTAERDNWVAQLKTKIAEAKELAATVTESETYKKTLESLKPAPTKKEEKAPAAETVAAEPATTTTEEAAPAAEAPAAEAAKEEPRKEEDKAEKEEPKRRSASRKRASIFGNLLGKKEEKKAAETEAKPVEEAPAAETSAAAESSEAPAAEAATEAAAEPATEAAATTEAAAEAKPEEQTEEAKEGEKKEEKKETTEARPAHAKRTSIFSNLSFGKKKTAAPAEAPAKEAPATTEAVAETAPVIPAVETTEPLSAEVSAPANAPAETTEGAPATNGETKKEVKSEKRKSSLPFAFGKKKDAASSDEEAEKPKSPSAFSKLRATIKGKGKAEKPEKTEETPAAPAAETEAGEAKAEAKAEEPAAEEAAKPAEAETTAAAPAAAEEETPAKPLESTPAVTAAA

SEQ ID NO: 3294 - DNA, 819 bp, Myceliophthora thermophilia
atgcccggcttcgatttctcaaactacaaccgcaatgcggcgctccacgcgcggggcgtaccgctgcccaaggccaccagcacaggaacaaccattgtcggttgcatatacgacggtggcgtagtgatcgcggccgacacacgagcaacatcaggcccgatcgttgccgacaagaactgcgagaagctgcactacattgcgcccaacatctggtgcgccggcgccggcacggccgccgacaccgagtttacgaccagcctgatcagctcaaacctggagttgcacgccctctcgacgggccgcaagccccgcgtggtcaccgccatgacgatgctcaagcagcacctgttccgctaccaagggtacattggtgcctacctggtcgtcgcgggcgtcgacccaaccggcacgcatctctttaccgtgcacgcgcacggctcgaccgacaagctcccctacgtgacgatgggctcgggctcgctcgcggccatggcggtgttcgagacgcagtggaagcctagcctgacacaagaggaggcggtcaagctgtgcgccgacgcgatcgaggcgggtatctggaacgatctggggtccggcagcaacgtggacgtggccatcatcacggccgagaagacaacgctgcggcgcaactacatcaagcccaacgagcgcgcgcagaagctcaagagctacgccttccccaagggcaccacggctgtgctcgacgagaagatcatccacaaggaggatttgagcaagtttgtgaccgtgcatgagctgacggagcagagcggtgatgtgatggaggtggacgcttag

SEQ ID NO: 3295 - protein, 272 aa, Myceliophthora thermophilia
MPGFDFSNYNRNAALHARGVPLPKATSTGTTIVGCIYDGGVVIAADTRATSGPIVADKNCEKLHYIAPNIWCAGAGTAADTEFTTSLISSNLELHALSTGRKPRVVTAMTMLKQHLFRYQGYIGAYLVVAGVDPTGTHLFTVHAHGSTDKLPYVTMGSGSLAAMAVFETQWKPSLTQEEAVKLCADAIEAGIWNDLGSGSNVDVAIITAEKTTLRRNYIKPNERAQKLKSYAFPKGTTAVLDEKIIHKEDLSKFVTVHELTEQSGDVMEVDA

SEQ ID NO: 3296 - DNA, 1230 bp, Myceliophthora thermophilia
atggctcctattgcaaaagctgtaacggtgtcgttgcaagacctcaaggacggcaccgtgtcgtcagaaaccctctacgaggccttcgggcccgactcgctggggattctggtcgtcaaggacgtgccgcccgagtttgccagtttgaggcaccacctgctgtcgtactcgtcttacctgggaaatctgcccaagtcagagctcggtgcgtttcacattgtgtgccgcgaaaagccgaacgctgtgctgctggctgtgctgctgactgcgctaacgtccaactcgccagacaagctcgagaacgagaaggcaaagtatctgaccggttggtccctcggcaaggagacgctcaagaacggccaggtcgacacattgaagggctccttctacgcaaactgtgccttctacgtcgaccccaagctgtcgtgtgccgtgcccacggagcagttcaacccggacaacttccccgagtacctctcgcccaacatctggcccggtgaagatacccttcccgggttcaaggagaccttcgagaacctttgccggctgatcatcgacgtggccgtcctcgtggccagggcctgcgacaggttcgcccagaaggagattcctggctacccgagcggctacctggagcgcgtcgtgagcacctcgaccaccaccaaggcccgcctgctgcactacttccccgaggacccctccaaggagccggcccccgtgtccgtgtcggacgaggtcgccaacaacaacgatccggacgaggacgactggtgcgcaacccacctcgaccacggctgtctgaccggcctgacctcggccatgttcgtcgacgagtccgagtcgagcccgctggtggccgcgcccgaggtcgagcccgcctcgcccggcgtgtcgcacctcgccccgctccccgagctggactcgtcgcccgacccggccgccggcttgtacatcaagtcgcgcaccggccggacggtgcacgtcaagatcccgcgcgactgcatcgccttccagacgggcgaggccctcgagcgcatcacggccggcaagttcaaggcggtgccgcactttgtcaggggcgcgagggctgccctctgcgacggccggatcgcccgcaacacgctcgccgtgttcacccagccgaacctggacgaggaagtggacatggagcagcacattacctttggggaatttgccaggggcatcgttgcgaagaatactgtttcatga

SEQ ID NO: 3297 - protein, 409 aa, Myceliophthora thermophilia
MAPIAKAVTVSLQDLKDGTVSSETLYEAFGPDSLGILVVKDVPPEFASLRHHLLSYSSYLGNLPKSELGAFHIVCREKPNAVLLAVLLTALTSNSPDKLENEKAKYLTGWSLGKETLKNGQVDTLKGSFYANCAFYVDPKLSCAVPTEQFNPDNFPEYLSPNIWPGEDTLPGFKETFENLCRLIIDVAVLVARACDRFAQKEIPGYPSGYLERVVSTSTTTKARLLHYFPEDPSKEPAPVSVSDEVANNNDPDEDDWCATHLDHGCLTGLTSAMFVDESESSPLVAAPEVEPASPGVSHLAPLPELDSSPDPAAGLYIKSRTGRTVHVKIPRDCIAFQTGEALERITAGKFKAVPHFVRGARAALCDGRIARNTLAVFTQPNLDEEVDMEQHITFGEFARGIVAKNTVS

SEQ ID NO: 3298 - DNA, 1797 bp, Myceliophthora thermophilia
atgggtcgcaggaagattgatatcaagcccatcaaagatgagaggaaccgctctgtcacctttttgaagaggaaaggcggcctcttcaagaaggcttatgagctatcagtgctctgctccgtcgacgtggccgtcgtcatcttcggcaacaacaagaagctgcaccagttttcgtctcgggacatgcgcgagatgctccagcggtggaccttgcacggtgagcccaatgagtacaagatcccggcggatttcaacggcggagccgacgacgatgacgacgatgacgaaaacggcagctcgccgcaaggcgagggcgtggatcctcagatgtaccctcctcagttccaaactcagccccagttccccgtcatccgaaatcacacggcttcggcatcgcccccgatccccaatggcgtgtttgggccccgcggccacaccccccaaccccagatggcgtcccggccctcgtcgcgcaacgacattcaccgaatgggggcgaacatggtcggccaaccagttggtcctcccgggtcgcaaccgggtgctgtgaacggcttctcccggtcttacatgccgcagacggccatgtacaacgcccagaacccccacaatatgccaccaaacatgcctcacgggttgccgcaacctcacccgcaatattcctacccgcagcaacagccgcatccgcaccagatgcagccgtacgtggacgaacagcgaagagcgtcgggacctgcgactttccctcatcagccaccgcagggtcaacagcccggacgccattccgtgtccccgccgcagcctcccgctcagctgcctccccagcccgttccgcacatgtcgccgccggcgcaggcacaagcccaccccattcagagtccgcctcagcaacacctgccgccccctcccccgaaccaacagcacgaagtcccccacatttatgttccaacccaggaatcgcccgccacggagcccgcgcccgcgcccgcgcccgcgcccgcgcacgcggagccgaagccgaagcaggatctagtggagagagcgcgtcaaccgctcctcctgaacaccaacgttaagaagcaacctccgcgcaagggagggagcattttcactccgattgaggagaacaagtcgatccttcagcagcatctagccgcgtttagccgtcccgaggtcaaatcagaagcaccaccgtctagcagatcacagtcgatagacgcgggcagtgcgccgaaaggcagcaatccgagctcgccaccatcgctgccccgcataaacacgcaaccacaacaacctcagatcaagcggaatgggtcgctggggacaattcccgagaccgtcttcacccctccctcgcggtccaacagcctccgcgtcggcggcagcaacccgcggccgccagttgaaggcgtcgtcctgccgcccccctccccttcggcctccgcaaccctcctctcggcaggtgccaccggccctcccaacccatttgcccggccgcctccgcatcagaccattgagacgcccgtctcttccctgccgtcccgcttcctcggagacggcctcatgccgagccccaaccctttctacgcagaatggggcatgaagggtaacgagcacaacaccctgagcccgctgacctggtccacgcctgtcgccgggatgggcccgtccttcctgcgggaggatctacccccgctcaagaggaagagcccggagcctagcggaaatggcggggatcacgagacttccggtgaggcgttgggcgccgatgccaagagagtaaaggttgatcactga

SEQ ID NO: 3299 - protein, 598 aa, Myceliophthora thermophilia
MGRRKIDIKPIKDERNRSVTFLKRKGGLFKKAYELSVLCSVDVAVVIFGNNKKLHQFSSRDMREMLQRWTLHGEPNEYKIPADFNGGADDDDDDDENGSSPQGEGVDPQMYPPQFQTQPQFPVIRNHTASASPPIPNGVFGPRGHTPQPQMASRPSSRNDIHRMGANMVGQPVGPPGSQPGAVNGFSRSYMPQTAMYNAQNPHNMPPNMPHGLPQPHPQYSYPQQQPHPHQMQPYVDEQRRASGPATFPHQPPQGQQPGRHSVSPPQPPAQLPPQPVPHMSPPAQAQAHPIQSPPQQHLPPPPPNQQHEVPHIYVPTQESPATEPAPAPAPAPAHAEPKPKQDLVERARQPLLLNTNVKKQPPRKGGSIFTPIEENKSILQQHLAAFSRPEVKSEAPPSSRSQSIDAGSAPKGSNPSSPPSLPRINTQPQQPQIKRNGSLGTIPETVFTPPSRSNSLRVGGSNPRPPVEGVVLPPPSPSASATLLSAGATGPPNPFARPPPHQTIETPVSSLPSRFLGDGLMPSPNPFYAEWGMKGNEHNTLSPLTWSTPVAGMGPSFLREDLPPLKRKSPEPSGNGGDHETSGEALGADAKRVKVDH

SEQ ID NO: 3300 - DNA, 684 bp, Myceliophthora thermophilia
atggccctcccgcccaggctgaaaggccatcgctacaccttcccggatgcctatacctcgtcctccgatggggcggccccggctctgcacacgctcgagatctacctcgactacgtctgccccttctcagccaagatcttcaacacgctcgtcgagtcggtgatcccctacgtgcggcagcgcccggagctggcgtcgcggctggagatcgtgctgcggccgcagatccagccgtggcacccgtcgtcgacgctggtgcacgaggcggcgctggcggtgcagcggctgacgcgggacgacgcgacggcggagcggttctggaccttcctgcgggccctcttccgcgagcagagggcctacttcgacgaggccgtcgtcgacgagccccgcaaccggacgtaccgccgcctggccgagctggcgcaccggagcatcggcgtgtccgccgacgaggtgtacgcgctgctggagatcaggccgactacggccggggccgggggtgacgaagccaggaacgccggcaaccaggtcacggcggacatcaagaccattgtcaagatcgccaggctgacgggcgtgcacgtcacgccgacggtgctgctggatagcgtggtggtgggagagatcagcagcggatggacaagcgaacagtggcagaagtggttggatgcgaatatccagtga

SEQ ID NO: 3301 - protein, 227 aa, Myceliophthora thermophilia
MALPPRLKGHRYTFPDAYTSSSDGAAPALHTLEIYLDYVCPFSAKIFNTLVESVIPYVRQRPELASRLEIVLRPQIQPWHPSSTLVHEAALAVQRLTRDDATAERFWTFLRALFREQRAYFDEAVVDEPRNRTYRRLAELAHRSIGVSADEVYALLEIRPTTAGAGGDEARNAGNQVTADIKTIVKIARLTGVHVTPTVLLDSVVVGEISSGWTSEQWQKWLDANIQ

SEQ ID NO: 3302 - DNA, 1431 bp, Myceliophthora thermophilia
atggctgcagatgcgcagccacatgaccacaaggactcgtctctgacctcgacgccttccaacaatgacgccgctgcctcccgagagagcacccaagaaccttcaatggccccggccccggccccggttccctttgtgccaccggacggaggcatgcgggcttggctcacggtagtcggaggatggctctgccagttttgctcattcggcttcatcaatgccctcgggtccttccaatatgtctacgagaaggagattttgcccgataagtccccgtctaccattacgtggatccttaccaccaagctgttcctcatgttcttcctctcccagcccgtcggcgtcggcgtcgacatgttcggcgtgcggcccatcctcatccctgcttttgccttctgcgtcggcggtctcattgccctgtcctttgccaccgagtactggcagatctttctggcccagtctatctgctttggcctgggcgccgccggtgccttcgtcccgggcctggtcgccgccggccagtacttcaagaagaggcgggccctggccatgggaatcgttattagcggcagctccgtcggaggtgtcgtgttccccatcatgcttgcccgcctctttgaagagatcggcttccgccaaacgatgcgctggacggctctgatgatcggcgttatgctcgccatcgccaacctcctggtaaccagcccagtgccgccaaagggcctggccggccgccgaaccctcactactctgaagcccttcaagatgcccacctatctcctgtttgtttctggcagcttcctcttctactggggtctctttgggccctttgactacctacccctttttgcggaaggggacgagtcgaccaaaagaatcgccctctacacggtctcgatggtcaatgccgcctcaatccctggccggatcctgcccaacatgtactcggaccgggtgggctcgtcgctgcgcaccatctcgctgtgcggcctgctggccggcatctcggtgctcgtcatctggctgcccatcaattaccgccactctctcgcgggcctgatcatcttcgccctcgccttcggggtcacgtcgggcgcctttgtctccctcatgaccccggccatgattgaggtcgcgggcggccacaccaccaacctcggcgccatggtcggcaccttcttcgccatcattgccatcgccagcctgaccggcctccctacccagaccgcgatcgctggcggccacggcggcggcggtgacaccgacttgatgggcctcatcgtcttctgcggcgtcgtcatgctcgccggcaccgccctcgtctacgctgcctccgtcttgagcgccaggaacaagaggagggccgccgacaaggaggccgtcgcggcaaatgcaaacggccacatggcgagcggggaaacaaaggcctaa

SEQ ID NO: 3303 - protein, 476 aa, Myceliophthora thermophilia
MAADAQPHDHKDSSLTSTPSNNDAAASRESTQEPSMAPAPAPVPFVPPDGGMRAWLTVVGGWLCQFCSFGFINALGSFQYVYEKEILPDKSPSTITWILTTKLFLMFFLSQPVGVGVDMFGVRPILIPAFAFCVGGLIALSFATEYWQIFLAQSICFGLGAAGAFVPGLVAAGQYFKKRRALAMGIVISGSSVGGVVFPIMLARLFEEIGFRQTMRWTALMIGVMLAIANLLVTSPVPPKGLAGRRTLTTLKPFKMPTYLLFVSGSFLFYWGLFGPFDYLPLFAEGDESTKRIALYTVSMVNAASIPGRILPNMYSDRVGSSLRTISLCGLLAGISVLVIWLPINYRHSLAGLIIFALAFGVTSGAFVSLMTPAMIEVAGGHTTNLGAMVGTFFAIIAIASLTGLPTQTAIAGGHGGGGDTDLMGLIVFCGVVMLAGTALVYAASVLSARNKRRAADKEAVAANANGHMASGETKA

SEQ ID NO: 3304 - DNA, 2655 bp, Myceliophthora thermophilia
atgaaacggagagccgttgatccggccgacgacgaatctctcggaccgcttcagcaccggcagcggcagccgagccaacaacagcccgcccagaacgggcagccgcaacatgccccgccggaacatgccccgccggaacatgccctgccccagcagaatggccaacagaatccccaccagcagcagaataatggccccaaccggcagcagcagcagcagcagcagcagcgtggtggcccggtccaggggcgccggcaaccccaaacctcgtgcgactcgtgccgcaagcggaagctcaattctgacccgtcgtcgaccactgatgccgtcctgcggaggcttcgtgctctcgaggaagctgtctttggtagccaccaggatcagcgggactccaaggactatgaggaccacggagactacccacagaacgggtaccgcccggataggcgtattcggcgggaccagacttcgcaggccagcagctctgccgacactcccccgctcacgctatcctcgacagaagggacgacggtagaaacggcagggtcggcagggacagcagggagagcagagacagctgccacagtaggcccccaggagctggagctcggccatacggccaccatgccgctaggccggctccggaactttaaggtcggcatcgccacgcaccgggccgggtaccccctcgcattcctcggcacctccgtgctagagatgggcgttatctggataatgtcccggtctgccgctgccaccctgttgcaggactacctcgaccacgtctaccccctccagcccatcatccatggccccaccacccggaaactcctcgaggacttctacgatgggctcgcccgccgagatcgcctcgcgccacatacggctgccctcatcctggctctggccgccgccagcgcctacttttggcagcccggcatcgggcgtcacaactacttcgccgccgtcaaggaggccgtcgaggcctccttcatctggcgcgactgggccttggacatcctggtcaacacgggccaagagcagggaaccagcaccttcgagggcgtccaggcctgggccctgctctcctttctggcccagactgccgagggcgcctctcaccgtttccgcttcttgcacaactgctccctcgccgccgcgcgcgagctgtcgctccacctcgtcgacagcccgaccaaagcagatcctgcgaaccgtgccggcgacgagaaccccgtcaactgcgagcttaagcggaggatctggtggcatattgccgtgaccgactggctgctcggcttcgcggggggcccgaccgaaggcacgtactcagtgcagctgcgccacatgagcgtccggtatccgaagaacgtgaacgacgacgagctggagacgctgaacgactcggtcgatgcgcccctccaccgcttcacccagatgtcgtactttctccagcggatccgcatcggcgagataatccgggccgttctcgacgccagcagtccgggagacgccgacgtgaacatctcggattacaacaaggtcctcgccttcgaccgcctcttcgagcaggccctatccgacttgcccgccttcttccggcgccaggaccacctcccaccccggaggcccgacatgcttgacctgcagcgcgttcttctccagctcggcctactctcgcgtcgcgcccgcctgcaccgcccttttctcctgcagcaacacggccggcatggtcgatctggcttccaccgtaaccggtcccgcgacatctgccttgagtccacccgcgccgttgtctccctcgggatcgacatcatccaacgctccctgtacgttaaccaggcaccaacagaaacagcaacgacaacgacaactatgggcgaccccgtgctcaacaagacgcctggcctctcggtccaccgcctcggcctcatcatcagccacctctcggccgcctgcaccgtcctggccatctacaccggaagtgctagcagcagcaagggacgattcaccgagggaaacggactggagaatggagacgaggatgacgacgaccaactgaaccgggccgccgtgtcccacgagctggcgcaggtttgccgcgtcctaggggccctcggcaccgagtcgcccgtcgccgccgatttgctgcggaacctggttggcctcctgaaccgctaccgcgcccccccggtccagcagggagtggcgccgacggtaaatgacaaaaatgttgatggcagtggtggcggtacccggactagaggcgctcacttgatgaaggaggaggagagggagcaacagcagcaaggactgcagcaacagcacaactaccagcaccagcattatcagcaacagcagcaacagcaacagcaacaacaacaacaacaacaacaacaacaacaacagctacagcagcagcaaatcgtgccaccctcatggacgcccgcgaaccagatggacgacggaggacggttccccctccccactgcggacgtgattccgcagcctggtccgcccgtgattcttggtggcggcggcggcgctccgcctccgttcagcctagacgggttgtgggacggcttcaccataggctcgagcgacgactacacccaactattcgctaacttggactattattgcggcatcgcctag

SEQ ID NO: 3305 - protein, 884 aa, Myceliophthora thermophilia
MKRRAVDPADDESLGPLQHRQRQPSQQQPAQNGQPQHAPPEHAPPEHALPQQNGQQNPHQQQNNGPNRQQQQQQQQRGGPVQGRRQPQTSCDSCRKRKLNSDPSSTTDAVLRRLRALEEAVFGSHQDQRDSKDYEDHGDYPQNGYRPDRRIRRDQTSQASSSADTPPLTLSSTEGTTVETAGSAGTAGRAETAATVGPQELELGHTATMPLGRLRNFKVGIATHRAGYPLAFLGTSVLEMGVIWIMSRSAAATLLQDYLDHVYPLQPIIHGPTTRKLLEDFYDGLARRDRLAPHTAALILALAAASAYFWQPGIGRHNYFAAVKEAVEASFIWRDWALDILVNTGQEQGTSTFEGVQAWALLSFLAQTAEGASHRFRFLHNCSLAAARELSLHLVDSPTKADPANRAGDENPVNCELKRRIWWHIAVTDWLLGFAGGPTEGTYSVQLRHMSVRYPKNVNDDELETLNDSVDAPLHRFTQMSYFLQRIRIGEIIRAVLDASSPGDADVNISDYNKVLAFDRLFEQALSDLPAFFRRQDHLPPRRPDMLDLQRVLLQLGLLSRRARLHRPFLLQQHGRHGRSGFHRNRSRDICLESTRAVVSLGIDIIQRSLYVNQAPTETATTTTTMGDPVLNKTPGLSVHRLGLIISHLSAACTVLAIYTGSASSSKGRFTEGNGLENGDEDDDDQLNRAAVSHELAQVCRVLGALGTESPVAADLLRNLVGLLNRYRAPPVQQGVAPTVNDKNVDGSGGGTRTRGAHLMKEEEREQQQQGLQQQHNYQHQHYQQQQQQQQQQQQQQQQQQQQLQQQQIVPPSWTPANQMDDGGRFPLPTADVIPQPGPPVILGGGGGAPPPFSLDGLWDGFTIGSSDDYTQLFANLDYYCGIA

SEQ ID NO: 3306 - DNA, 813 bp, Myceliophthora thermophilia
atgaacaccgacgacgatgacgttgacgatggcgatatggttgatgacgagagcactcccggccatcctgaactggaagaaagagaggacgaccccccggggggggggggggggcttgggcgcgccaggactgcgtccggatcagcggcggttgggttcgcggtggtcccgtggcgtttaggcggcacggaaggtgggctctcgagctacgtcatcgtccgccgccatctggtggcactcgccgggcgacgggacaggaccgacggtgaggtcgatgaccttggcgaactgatcatgcctgccgtcagtcctcggtggttcttgattcgaacggactccgggagaccccgttcccttaagaaagaaaaggacaggttaacagcagtgctcgagccgcttccgctgcccgctgcggctggtcgggaagggtgccagccacgtcagcattcgtatatccgccggcaccttccggaatctcacctcgacccccccttcccaaccaccaccgccaacaattccactcgcaacacccgcccgagcctcccctcgccctcctctacgccgacctcccgaagcacagccatcgagcaaaccccgcgccccaccaccgtcatcacctccgcccgcacccgctgccggaccgaggctgccgacgtcttcctcggcgccttcctgccgccgctcctgcgaaaccgggaggtgagaatggtgcaggagggggaggaagcgatgaggagggcggtggagggcaggcggtaccggttgggctactcttcttcggggaggtgggaagggaggagtacgggattgtga

SEQ ID NO: 3307 - protein, 270 aa, Myceliophthora thermophilia
MNTDDDDVDDGDMVDDESTPGHPELEEREDDPPGGGGGLGRARTASGSAAVGFAVVPWRLGGTEGGLSSYVIVRRHLVALAGRRDRTDGEVDDLGELIMPAVSPRWFLIRTDSGRPRSLKKEKDRLTAVLEPLPLPAAAGREGCQPRQHSYIRRHLPESHLDPPFPTTTANNSTRNTRPSLPSPSSTPTSRSTAIEQTPRPTTVITSARTRCRTEAADVFLGAFLPPLLRNREVRMVQEGEEAMRRAVEGRRYRLGYSSSGRWEGRSTGL

SEQ ID NO: 3308 - DNA, 315 bp, Myceliophthora thermophilia
atgtaccgccaattaatgcaaccctcctacgccaccaagccctcgcgcatcgagccgacagattgggctcggccaatcgagtcccaagttgcaatccctcctccccggtatctggtcctcgccctcccaactccaattttcgccctttttttgggcaccaatgattttccgcgagctgcgcatctcgcctacagccctggccggcaccaccagtctcaggtcaatcccgctcggctgttcttggccttcacttcgctcaaacttgacgtcatgcgaaagcaggctgcgctcagcaagagaggtgggaaggtctag

SEQ ID NO: 3309 - protein, 104 aa, Myceliophthora thermophilia
MYRQLMQPSYATKPSRIEPTDWARPIESQVAIPPPRYLVLALPTPIFALFLGTNDFPRAAHLAYSPGRHHQSQVNPARLFLAFTSLKLDVMRKQAALSKRGGKV

SEQ ID NO: 3310 - DNA, 723 bp, Myceliophthora thermophilia
atggccgaccccgcgttcaggcccgcgctgcttgttgttgacatgcaagaggacttttgccctccgaatggcgccctcgccgtgaatgaagggcgggacatcgtcccactgatcaacgagctcctcgccctgccgtcgtcgacgctcccgctcaagattgccaccaaggactggcacccgccggaccacgtctcgttcgcgagcaaccacggcggtgacgacggcccgccgaagcggcccttcgtcgacaccgcgaccgtcaccaacccgcacaacccggccgagtcgtacacgacgcgcctctggccggtgcactgcgtccagtcgaccgcgggggcccgcctggtcccggagctggacgccgcgcggctcacgcacacggtcgagaagggcaccgacccgcgcgtcgagatgtacagcgccttctacgacccgctcacccgcccgcgcgtgtccgacagcgggctcgccgacctgctgcgcgcccacgccgtcacccacgtctacgtggtcgggctggccgccgactactgcgtgcgctgcaccgccgaggacgccgtgcgcgagggcttcgtcgcgtacgtgatcgaggaggcgacgagggcggttgaccccgacgggtgggaggggtgcaagcgggagatggaaggggtgggcgtgaggattgtgacgtgggaagggccggaagtgaggaggttgttcgaggggggacaagagaagtga

SEQ ID NO: 3311 - protein, 240 aa, Myceliophthora thermophilia
MADPAFRPALLVVDMQEDFCPPNGALAVNEGRDIVPLINELLALPSSTLPLKIATKDWHPPDHVSFASNHGGDDGPPKRPFVDTATVTNPHNPAESYTTRLWPVHCVQSTAGARLVPELDAARLTHTVEKGTDPRVEMYSAFYDPLTRPRVSDSGLADLLRAHAVTHVYVVGLAADYCVRCTAEDAVREGFVAYVIEEATRAVDPDGWEGCKREMEGVGVRIVTWEGPEVRRLFEGGQEK

SEQ ID NO: 3312 - DNA, 1767 bp, Myceliophthora thermophilia
atgtcaaccgcggaggagctcaaggctctgggcaacaaggccatcgcggccaagaacttcgacgaagccatcgacaagttcacacaggccattgccctcgacccgaacaaccacatcctctatagcaaccgatcagctgcatatgcctccaagaaggactgggataaagccctgagcgatgccgagaagacaacacagctgaagcctgactggcccaagggctggggccgcaagggcagcgcgttgtacgggaagggtgatctacttggggcccatgacgcctacgagcagggcctgaagctcgaccccaacaatgccggcatgaagaacgatctggcgtcggtgaagagggccatggagcaagaggcgggaggtgccggcggtttcgacccgacgggaggtattggcaagatgttcaacgaccccaacctgattcagaagctcgccagcaaccccaagacgagctcattgcttgccgacgccagcttcatggcgaagctgcagtccatccggcagaaccccaacaacatgcaggagctcttcagcgacccccgcatgatccaggtcctcggtgtgctgatgggcgtcgatatggagatgcgtgatacgccgcccgaggcagcggccagctcctcgaactcgcgtgtcgagccggaagaggacgtcccgatgacggatgcctcggcgaagaagcccgagccagcaaagaaggagccggagccggagccggaaccggaggagctggacgaggaggccttggaaaagaagaaggcgaaggaggcggccgacaaggagaagcttctcgggaccgagaactacaagaagcgcaattttgacgaggcgatcaagcactaccaggccgcctgggatctgcacaaggacatcacctacctcaacaatctgggcgccgcctatttcgagaagggcgactaccaggcctgcattgacacgtgcactaaggcggtggaggagggccgtaacctgtacgccgactttaagctgattgctaagtcgtacgcccgcatcggtaccgcgtacgagaagacaggcgacctggccaaggccatcgacttctacaaccagtctctccgcgagcaccgcacacccgaagtggttaacaagttgcgcaccgcggagcgcaacaagatcgaagccgcgcgcaaggcttacatcgaccccgtcaaggccgaggaggcccgcgaggagggcaacaagaagttcaaggagtcggactggcccggcgccgtggccgcgtacaccgagatgaccaagcgcgcgccggacgaccctcgcgggtacagcaaccgggcggccgcctttatcaagctgctcgagttccccagcgcgctcgaggactgcgacacggccatcaagaaggaccccaagtttatccgcgcctacatccgcaaggcccaggcctacttcggcatgcgcgagtacagcaagtgcatcgacgcctgcaccgacgccctcaacgtggataccgagcaccacaacggcgccaacgccaaggagatcgagcagcagcagcagaaggcgtttgccgccatgtatgcggcgcgggagaacgagacggaggagcagaccagggagcggttgatgcgggatcccgagatcatgaatatcatgcaagaccccgtcatgcaggcgatcctgcagcaggcgcagtccgaccccgccgcgcttgcggagcacatgaagaaccccaacgtgcgcaccaagatccagaagctcattgccgccggcgttatccgcgtgggccactga

SEQ ID NO: 3313 - protein, 588 aa, Myceliophthora thermophilia
MSTAEELKALGNKAIAAKNFDEAIDKFTQAIALDPNNHILYSNRSAAYASKKDWDKALSDAEKTTQLKPDWPKGWGRKGSALYGKGDLLGAHDAYEQGLKLDPNNAGMKNDLASVKRAMEQEAGGAGGFDPTGGIGKMFNDPNLIQKLASNPKTSSLLADASFMAKLQSIRQNPNNMQELFSDPRMIQVLGVLMGVDMEMRDTPPEAAASSSNSRVEPEEDVPMTDASAKKPEPAKKEPEPEPEPEELDEEALEKKKAKEAADKEKLLGTENYKKRNFDEAIKHYQAAWDLHKDITYLNNLGAAYFEKGDYQACIDTCTKAVEEGRNLYADFKLIAKSYARIGTAYEKTGDLAKAIDFYNQSLREHRTPEVVNKLRTAERNKIEAARKAYIDPVKAEEAREEGNKKFKESDWPGAVAAYTEMTKRAPDDPRGYSNRAAAFIKLLEFPSALEDCDTAIKKDPKFIRAYIRKAQAYFGMREYSKCIDACTDALNVDTEHHNGANAKEIEQQQQKAFAAMYAARENETEEQTRERLMRDPEIMNIMQDPVMQAILQQAQSDPAALAEHMKNPNVRTKIQKLIAAGVIRVGH

SEQ ID NO: 3314 - DNA, 1035 bp, Myceliophthora thermophilia
atgacctcggcagcagccgaagcccttctatctccgagtctccctccctccccccctccgcctccgccgccgcctgctacgacagtggatgacggctacaaggccgacgacgacggtgacggcgacagtgagaacggtagcaaggggccgaacgagccgcggctcagcagcttctactctttctataccttgaccatgtgtgaaggcgacatgacggccgacggtgccagccgaatcatcaaatgccacccctacttctccaagcacctcatcacaatccccgccatcagcagcgccaccagctgcgccgccgccgacaataacaacaacaaaaccaacaacaatgttgacaacgcggacgacagttacagcgacgacgacccctccggggtaggctacggcctgcaattcgcggtcgacaacctgatcacgctgctcaagacggtggcggcgttccagtcgatcgggatcgggctgacggggctggccgcgttcgccgcggtgccggcggcgtcgctcgacgacgcggactgcagaggaggcgacgagtacggacccggcggcgggggcagcgcgcggcagcggtactcgtgggcggtgtggttcaacctggcgtgcgcgtccgccgccgccctgttcctgctcctgggcgcgctgacggccgcggcgggggccaaggtggccgaggagtcgatcgacgagctcggggcggtgcgcgcggcggcgggccgcagctgggtcgcgctcgcgtgggccgccgtcgccctcgtcgttgccgccgtcgtccactgggcggtcagaggggccaggtggaggaagatgctgaggggggagagggaggagcggagggagcgggagaggaagaaggagatggagcagtttgccaggaggagggtcgaggaggcgacgaagcagctgggtgcccatgcccagaagggcaaggaggggccgcctcggcccggggttcgcgtgaagcccccgacgccggcgccggcgccgccgtcattatccagcccggctctgggctttatttag

SEQ ID NO: 3315 - protein, 344 aa, Myceliophthora thermophilia
MTSAAAEALLSPSLPPSPPPPPPPPATTVDDGYKADDDGDGDSENGSKGPNEPRLSSFYSFYTLTMCEGDMTADGASRIIKCHPYFSKHLITIPAISSATSCAAADNNNNKTNNNVDNADDSYSDDDPSGVGYGLQFAVDNLITLLKTVAAFQSIGIGLTGLAAFAAVPAASLDDADCRGGDEYGPGGGGSARQRYSWAVWFNLACASAAALFLLLGALTAAAGAKVAEESIDELGAVRAAAGRSWVALAWAAVALVVAAVVHWAVRGARWRKMLRGEREERRERERKKEMEQFARRRVEEATKQLGAHAQKGKEGPPRPGVRVKPPTPAPAPPSLSSPALGFI

SEQ ID NO: 3316 - DNA, 984 bp, Myceliophthora thermophilia
atggcatcccctagccaagttgctccctcgtggctcgcccggctcgacgagatggccgccgacatcatcccctcgacatatcccatcgagacggacaccctgggcatcatcaagaagctgctgctcgcccagggtgacgacaacgcagcggttggcgaggccgtgcacgagatccgctccttctacaccaccaaactgttcccgcccaacgaccccttctacagggacctcccggaccacggtgtttcccaagttgtcggcgccgtggtcgaccacgtctttgagctcgcgagcgctgtgccgtggaaggagtcagcacacaagcgactcgctgacctgctcatcgcgctcaaggagaacgccaccaccaccggcttcgatcccgcggatccccagctcggctgggagtcgagcaacctcgaatggcacgccgccgaaatttggcgcagctacaacccaacccacaccgcttcgcagcaagagtgcaccgaggccctgcgcacgcacgtcctgctcgcccgcctcgtcgccgccgacttgctgcccgccgacggcccctggcgcaccgcccaatgcgtgtccgagggcctcaataccaacaacaacaacaacaacaacagcggcggtggcggtggcgtcggcggcagctgggaggccgacaccgcgctggtgcgcacctgccgggcggccatcgccgcgcgctacctcgtcctcgccggccgcgccctcccgcgcgagctgcgccgcgcccccggcccggacaccgaggccgtcgtgcgcaaggccgagtgggccgcctgggccgagaggctgcgccggctcgcgtccgcctcctcgtcgtcgtcaccgccggcggcggcggcgggtggtagtgatggggacgatctcgtggccgtggcggaggtgccggaggagtgggatctgaaggcgggcgctgccgaggctgcgcgccaggtcgagatttggttgagtgggcaggtgtga

SEQ ID NO: 3317 - protein, 327 aa, Myceliophthora thermophilia
MASPSQVAPSWLARLDEMAADIIPSTYPIETDTLGIIKKLLLAQGDDNAAVGEAVHEIRSFYTTKLFPPNDPFYRDLPDHGVSQVVGAVVDHVFELASAVPWKESAHKRLADLLIALKENATTTGFDPADPQLGWESSNLEWHAAEIWRSYNPTHTASQQECTEALRTHVLLARLVAADLLPADGPWRTAQCVSEGLNTNNNNNNNSGGGGGVGGSWEADTALVRTCRAAIAARYLVLAGRALPRELRRAPGPDTEAVVRKAEWAAWAERLRRLASASSSSSPPAAAAGGSDGDDLVAVAEVPEEWDLKAGAAEAARQVEIWLSGQV

SEQ ID NO: 3318 - DNA, 831 bp, Myceliophthora thermophilia
atgcaacttcgtactccccctgaaaataatgactcgggatttgaaataggcgtctctcccaacagctcgtcgctcgtcgtggtctccatctcggcggcgcccaaggtgattcccgccctgctcggcctgctcggcggtatcttcggcgttgctagcgttgtcggccccgtcctcggcggagctttcaccgatcggctgacgtggcgatggtgcgctcgagtaattatggtggtgttaccaagccgatcaacttctcattcttcccccttggcttacaatctccccatctacttccaggcggttaacagagtgtctctgctggaaagcggcatccggttgctcccgaccatcctgcccatgacctgcgccctactggtcgggtggtatcagccgtggctgatgacgggcgcctcgcttgccgccgtgggtgccggactgatttacatgctggtcatcgccaacgccatcacgcccaagggggacaacagcattgccatgtcgaacatcctcttcttccagttcatcggcggcaccccgggcgtcggcatggcccagtccatcctcaacaacggcctcatccgcagcttcccccagtttgctcccggcgtcaccaccgccgaggtcctgagtgtcggcgcctattacgacctccagaccgtattctcgggagacaagctcctcggcgtcctgagggcttacgtggccggtctccatcatgcgtggatcctgagcattgcgggggcagccgttcccgtttgcttcccgctgatcggggcttttgtcaagctgtccaggttctcgccaaagagctgggaggagctaggaggataa

SEQ ID NO: 3319 - protein, 276 aa, Myceliophthora thermophilia
MQLRTPPENNDSGFEIGVSPNSSSLVVVSISAAPKVIPALLGLLGGIFGVASVVGPVLGGAFTDRLTWRWCARVIMVVLPSRSTSHSSPLAYNLPIYFQAVNRVSLLESGIRLLPTILPMTCALLVGWYQPWLMTGASLAAVGAGLIYMLVIANAITPKGDNSIAMSNILFFQFIGGTPGVGMAQSILNNGLIRSFPQFAPGVTTAEVLSVGAYYDLQTVFSGDKLLGVLRAYVAGLHHAWILSIAGAAVPVCFPLIGAFVKLSRFSPKSWEELGG

SEQ ID NO: 3320 - DNA, 1941 bp, Myceliophthora thermophilia
atgtcgacaatacagcaactcaaaaatttcattcgccatggtaggtcttctccgtccgatgccgcaagcgtgcgactgctgcgctcgggtcgcatgcgcaaacttgctggagagcgtttccgggacgagggggctgatgtcatgttcggcgtcacagggaaacaggcccgcgtagttgacgagtcgccgcggtcgaaaaacgacaattcgacgacaggtcaatcacaaatcaagaccggcaccgtcgggacaccggccacagatccagccgtcagcacaatctcggcagcgaaagcaactgggggctcggcccgccacgaacccgctcaaccgcaaccggcagacgccaagacgaagcagcacaagcgcattcccgacgagaatattgcaaagctcgtggccgaggagaatgagagcaagagcaagtttccgcactacccaggtctcgggcgatgggaactcctcgaaaagatgggcgatggtgcgttcagcaacgtctatcgggctcgcgaccgcgaggggattgcaggcgaagtcgccatcaaggtcgttcgcaagtatgagatgaacagcatgcagagggccaacatcttgaaagaggtgcagattatgcgccagatcgaccatcccaatatcatcaagctcatcgacttctccgagtctcgccaatattattacatcatcctcgagctcgcacccgggggtgagttgttccaccagattgtccgcttgacatatttcagcgaagatttgtcacggcacgtcatcacccaagtagccaaggcgctggagtatctgcatgaggaaaggggaattgtccatcgagacatcaagccagaaaacatcctcttcaaccccgttccgtttgttccctccaagaaccccaagccgaaacagccgggggatgaagacaaggtggacgaaggagagttcatcaagggggtcggagccggcggcatcgggcagatcaagattgccgactttggcctctccaagatcatctgggaaaaccagaccatgaccccctgcggcactgtcggttataccgctcccgagatcgtcaaggatgagaggtactctaaatcggtcgacatgtgggccctggggtgcgtgctgtacacgctgctgtgcggattcccgccattctacgacgagagcatcgaggtgctcaccgagaaggttgcgaaagggcagtacactttcctctcgccctggtgggacgacatcagcaaatcggccaaggatctaatttcccacctcctctgcgtggacccagaaaagcgctacacgatcaaggagttcctcgctcatccctggatccgcgaggccgggcccacgccgcgcgaagagaagaaggcgacgccggaggagaacgcgctgcgtgccttcgaaacgaccaagctggtcgagggcgacaagcgctatgacttacgctccccggccgccatcaacctgcgcgaggtcttcgacgtcggctacgccgtccaccgccaagaagaggagggcaagcggcggaaacaggtcggcgtcaaagcgggcggcgtatcgcgactgggtggggtcgacgagacgctcgatgaggacgaggagatggaggaggaccaggacccggccgaccagcaggccgacaagccccacaacggaggcacccaacaattggagcaaagcatgcgtgacacgcagatccgcgaccaggagcagcaacaacaacagcagcagcagcaggagcagcagcgcggccgggatcgcgagaggaaggcacaccctcccccggcagcggccgagcagcgcggctacggccagcactcggcggcggtcactgccgcagcctggcagcaggtacgcgagcgcaacaggcagaggggcgtgttcgagctgaacctcgacggcgccaccctgcttggccgccgcggcgtcaagcccgccgcgcagatagcttag

SEQ ID NO: 3321 - protein, 646 aa, Myceliophthora thermophilia
MSTIQQLKNFIRHGRSSPSDAASVRLLRSGRMRKLAGERFRDEGADVMFGVTGKQARVVDESPRSKNDNSTTGQSQIKTGTVGTPATDPAVSTISAAKATGGSARHEPAQPQPADAKTKQHKRIPDENIAKLVAEENESKSKFPHYPGLGRWELLEKMGDGAFSNVYRARDREGIAGEVAIKVVRKYEMNSMQRANILKEVQIMRQIDHPNIIKLIDFSESRQYYYIILELAPGGELFHQIVRLTYFSEDLSRHVITQVAKALEYLHEERGIVHRDIKPENILFNPVPFVPSKNPKPKQPGDEDKVDEGEFIKGVGAGGIGQIKIADFGLSKIIWENQTMTPCGTVGYTAPEIVKDERYSKSVDMWALGCVLYTLLCGFPPFYDESIEVLTEKVAKGQYTFLSPWWDDISKSAKDLISHLLCVDPEKRYTIKEFLAHPWIREAGPTPREEKKATPEENALRAFETTKLVEGDKRYDLRSPAAINLREVFDVGYAVHRQEEEGKRRKQVGVKAGGVSRLGGVDETLDEDEEMEEDQDPADQQADKPHNGGTQQLEQSMRDTQIRDQEQQQQQQQQQEQQRGRDRERKAHPPPAAAEQRGYGQHSAAVTAAAWQQVRERNRQRGVFELNLDGATLLGRRGVKPAAQIA

SEQ ID NO: 3322 - DNA, 1743 bp, Myceliophthora thermophilia
atggctactcctgcgattctcttcaccaacggaaggatcttccaatcgggcgtcgagccgggtaccagcgcgggtctgcaccgggaaccaacgttcgcctcgtgcatgctcgtccggggctcgcagatcgagcatgtaggctcgccatcagacgcgcccatcgccgccgcccttgcagcctcctcatcctcggacagcggcggcagcggcggcagcagcacggcgtccccgacgacgatcgtgcgagacctcggaggtcggacggtcctccccggtttcgtggatgggcacatgcacctgatgctattggggcaggcgctcaacaagctggacctgggcggatgccggacgctcgaggagatccaggcggcggtgcgggcgcacgcggccgcgcacccggaggcgccgcggatcctggcgcgcgggtggatgcacagcatgacgcccggcggcgtccgcgcggccgacctggacggactggcggtcgacgagcggacaggccgggaccgccccgtgctggtggactccaaggacctgcactcgacctggtgcaacacggcggccgtggcggagctgggcgccgacgcctgggccgacgtgcccggcggcatcatcgagcgcgacgccgaggggcgtcccacgggcgtcttcagcgaggcggcgaacatgacgtacgtctggcccttccttgcccgcgtagccaccctcgaggagcgagtagctgccgtcgaggcggccgtgcgcgcctaccacgccgccgggtacactggcctgatcgatatggccatggacgagggcgggtgggaggcgctgcaggcgtggcagcgggagaaggcgaagaagggtgaggacggaggcaatccggggatgcggatcgcggcgtactggctgatccggccgtgcgagcgcgtggaggacgcgctgcagcaggtcgagcgggcggtgcagctggcgggcgagttcggggcggccacgacgcccgactgccgggtggtgggcatcaaggtgatctgcgacggcatcgtggacgcctgcacggccgggctgaaggagccgtacgcgcacgacggccgggtcggggtgccgctttggacaagggaacacctcgagcctgtggtgcgccgagccgacgaggccgggctgcaggtcgcgctgcacgccatcggcgacgccaccatcgccatggtggtcgacgtgctggttcggcatgccaacccgaaccgccgaccccgcgtcgagcacctcgagctggcctcggaggaggacgccgcccggctcgggacctcccgcatcaccgcctcgatccagcccgtccacgctgacccggccatccttcgtgcctggccgcgcctgctgggcgagcaccgctgcggccgcgccttcgcctaccgcgacttcgcggaccgcggcgccccactggccctcggcagcgacgcgcctaccgcgccgcacgcgcccctgggcaacctttacgtcgccaccacgcgccgctcctaccgggacccggccgccggcgacgcccccgtgaacccccacttcgccctcggcctgtgcgaggccgtcgccgcggccaccgagggcgccgcctacagctgcttcgacgaccaccgggtcggcgcccttcgcaaggggctcaaggccgactttgtcgtcgtcgacaacatggagtgggacaaggacaagatcaccgcggccaccgtcgccgagacctggatcgacggagtcaaggtgtggtcgacatag

SEQ ID NO: 3323 - protein, 580 aa, Myceliophthora thermophilia
MATPAILFTNGRIFQSGVEPGTSAGLHREPTFASCMLVRGSQIEHVGSPSDAPIAAALAASSSSDSGGSGGSSTASPTTIVRDLGGRTVLPGFVDGHMHLMLLGQALNKLDLGGCRTLEEIQAAVRAHAAAHPEAPRILARGWMHSMTPGGVRAADLDGLAVDERTGRDRPVLVDSKDLHSTWCNTAAVAELGADAWADVPGGIIERDAEGRPTGVFSEAANMTYVWPFLARVATLEERVAAVEAAVRAYHAAGYTGLIDMAMDEGGWEALQAWQREKAKKGEDGGNPGMRIAAYWLIRPCERVEDALQQVERAVQLAGEFGAATTPDCRVVGIKVICDGIVDACTAGLKEPYAHDGRVGVPLWTREHLEPVVRRADEAGLQVALHAIGDATIAMVVDVLVRHANPNRRPRVEHLELASEEDAARLGTSRITASIQPVHADPAILRAWPRLLGEHRCGRAFAYRDFADRGAPLALGSDAPTAPHAPLGNLYVATTRRSYRDPAAGDAPVNPHFALGLCEAVAAATEGAAYSCFDDHRVGALRKGLKADFVVVDNMEWDKDKITAATVAETWIDGVKVWST

SEQ ID NO: 3324 - DNA, 1554 bp, Myceliophthora thermophilia
atggtgccgtcaacaaccaacaccgatgataatattctccaatcctgctgttcccacgaggagcggttccgcgatccggcctccccttcctccctcttccggatcgacatgcacacgcatatgatgcccccctccctccccgacttctcttcctcctcctcctcctcctcctcctcctcctcctcctcgacgacgacgacgacgtacgtgtggccggccctccgcccggcgccggaccacgccgagacgggggcggtcgacatgtacgtgggcgggtccttcttccggcgggtggaccgggcgtgctacgacccggcggcgcgcgtggccgccatggacgcggcgggcgtcgacgtgcaggtgctgagcacggtgccggccctcttctgctacgacgcccccgccgacccgcccggcccggccctcgacgccgcccgctcgctcgcccgcgccctcaacgaccacctcgcctccgtctgcgccgcccacccgcgccgcttcgtcgccctcggcaccgtgcccctccagcactgcccctccgccgtcgacgagctccgcaggctcgtgcgcctccccggcatggtcggcgtgcagatcggcaccagcgtggagaagcccgcgtcgtcgtcgtcgtcgacggcggccgcggagccgcccgtcatgctggacgacgagcggctcgaggagttctggagcgcgtgcgaggagctggacgcgcccgtcttcgtgcacccgctcgggtacgcgctgacgcgggagaacgcggcccgctggggcggctactggggctcgtggctcgtcggcatgccctgcgagaccgccctggccatgcaccgcgtcctggcgtcgggcctcctggtgcgccacccgaggctgcggctgtgcttcgcccacggcggcggcgccttcccggccctgctgggccgcatccagcgcggcttcgactgccgcccggacctggtcgccacccgcgcctgcggcgtctccccgaccgagcacttccgcggccgcgaggaggagacggcggcggcggcggcggcggcggccggcgggggtctccccccgcagatctggatcgactcgctcatgcacgacccggacctgatggagttcaccctccgcaagctggggccccacggcgccacccgcatcctcctcggaagcgactaccccttcccgctcggcgaggtccccgtcgccggcaagatgctgaccgaggacgagcagctgggccgcgtcatgacctgggccgacagggcgcgggtcctggccgggaacgccatccggttcctgaaactggggcgcgattttgaggagcggttcgaggagcggtggacgcgcttccagagcgcccgccagctcccggccggtgacgagcagcagaacaaggatggcggcctccgcgacagctggaggcatcgcgacagcgccatcgatctggccggggaggaacagctcgacggacaagacgacggcaagaggggatctgtgttattagtcaatggaaagccggaccgatctcccgaaagcatcagcgctgccctcgacgtgtaa

SEQ ID NO: 3325 - protein, 517 aa, Myceliophthora thermophilia
MVPSTTNTDDNILQSCCSHEERFRDPASPSSLFRIDMHTHMMPPSLPDFSSSSSSSSSSSSSSTTTTTYVWPALRPAPDHAETGAVDMYVGGSFFRRVDRACYDPAARVAAMDAAGVDVQVLSTVPALFCYDAPADPPGPALDAARSLARALNDHLASVCAAHPRRFVALGTVPLQHCPSAVDELRRLVRLPGMVGVQIGTSVEKPASSSSSTAAAEPPVMLDDERLEEFWSACEELDAPVFVHPLGYALTRENAARWGGYWGSWLVGMPCETALAMHRVLASGLLVRHPRLRLCFAHGGGAFPALLGRIQRGFDCRPDLVATRACGVSPTEHFRGREEETAAAAAAAAGGGLPPQIWIDSLMHDPDLMEFTLRKLGPHGATRILLGSDYPFPLGEVPVAGKMLTEDEQLGRVMTWADRARVLAGNAIRFLKLGRDFEERFEERWTRFQSARQLPAGDEQQNKDGGLRDSWRHRDSAIDLAGEEQLDGQDDGKRGSVLLVNGKPDRSPESISAALDV

SEQ ID NO: 3326 - DNA, 453 bp, Myceliophthora thermophilia
atggcaagtccgaacggcacaagtttcatactcgagtcgggagcccaagggctcgccaactacccgcatgcgcgcaccattcccagcacggccaaaacaattttcgtctcgggcatctcgagccggcgaccggacggcacgtttgaaggctgcgtggtgaagccggatgggacgtatgagctggattgcggcgcgcagacagcggcggtgctgcgcaacatcgagaccgtaattcggggagccactgacggccgcggaggactccagaacgttgtcgacgcgacagtgttcctcacagacatacgacgcgactatgccgccatgaacgccgagtggaacaagatctggccagaccgctgcaaggcgccggcacgcacgtgcgttcaagtcgcagcgctgccgaacgagaagattctggttgagatcaagtgtcaggcggtggtttccgagtga

SEQ ID NO: 3327 - protein, 150 aa, Myceliophthora thermophilia
MASPNGTSFILESGAQGLANYPHARTIPSTAKTIFVSGISSRRPDGTFEGCVVKPDGTYELDCGAQTAAVLRNIETVIRGATDGRGGLQNVVDATVFLTDIRRDYAAMNAEWNKIWPDRCKAPARTCVQVAALPNEKILVEIKCQAVVSE

SEQ ID NO: 3328 - DNA, 1614 bp, Myceliophthora thermophilia
atgggcaccagccgcgacgagaaggagacggtcgtggccgaccacgccgacgacgatgcactccgagaggccgacttggcggttcaagtcgcccacgatgccgacggtaccgtgtactcgccgtggtcgctgcgcatgatccgcctctaccttgtcctctcgctgagctacctttgcggatgcctcaatggctacgacggcagtttgatggggggcctgaacggcatgacatcctaccaacgctacttccacatgtccaccgccggctcgaccacgggactgatctttgccatgtacaacatcggatccgtagcggccgtcttcttcaccggccccgtcaacgactacttcggccgccgctggggtatgttcgtcggcgccctgctcgtcatcgtcgggacgtgcgtccaggcgccctgcacgaccaggggccagttcctggccggccgcttcgtgctcggcttcggcgtcagcttctgctgcgtctcggcgccctgctacgtctcggagatggcccatcccaagtggcggggcacgctgacgggcctgtacaactgcacctggtacatcggcagcatcgtcgcctcctgggtcgtctacggctgctcctacatcgacacgctcgacgcctggcgcatccccatctggtgccagatggtcacctcgggcctcgtctgcctgggcgtcttctggctccccgagagcccccgctggctcatggcccaggaccgccacgacgacgcggccagggtgctggcgacctaccacggcgagggccgggccgaccacccgctggtgaagttgcagatgcaggagatgatgaaccagatctcgaccgaggcgtccgacaagaagtggtacgactaccacgagctctggaacacgcactcggcgcgccgccgcctcatctgcgtcatcggcatggccgtcttcggccagatcagcggcaacagcctgagctcctactacctcgtcaacatgctcaagtcggccggcatcaccgaggagcgccgggtgctggccctcaacggcgtcaacccggccctgtccttcctgggcgccatcctgggcgcgcgcatgaccgacgtcgtcggccgccgcccgctgctgctctacaccatcgtattcgcctccgtctgcttcgccgtcatcaccggcaccagcaagatggccaccgacgaccccacccggaccgccgccgccaacgccaccatcgccttcatcttcatcttcggcatcgtcttctccttcggctggacgcccctccagagcatgtacatcgccgagaccctgcccaccgccacccgcgccaagggcaccgccgtcggcaacttttcctcctcggtcgcctccaccatcctgcagtacgcctccgggccggcatttgagggcatcgggtactacttctacctcgtcttcgtcttttgggacctcatcgagggcgccatcatgtacttttatttccccgaaaccaaggaccgcactctcgaggagctcgaggaggtcttctcggcgccgaacccggtcaagaagagcctggagaagaggagcgcccagacggtactgaataccgtcggcgccgcacaaaacgagaagctcgcacgagatgtgtga

SEQ ID NO: 3329 - protein, 537 aa, Myceliophthora thermophilia
MGTSRDEKETVVADHADDDALREADLAVQVAHDADGTVYSPWSLRMIRLYLVLSLSYLCGCLNGYDGSLMGGLNGMTSYQRYFHMSTAGSTTGLIFAMYNIGSVAAVFFTGPVNDYFGRRWGMFVGALLVIVGTCVQAPCTTRGQFLAGRFVLGFGVSFCCVSAPCYVSEMAHPKWRGTLTGLYNCTWYIGSIVASWVVYGCSYIDTLDAWRIPIWCQMVTSGLVCLGVFWLPESPRWLMAQDRHDDAARVLATYHGEGRADHPLVKLQMQEMMNQISTEASDKKWYDYHELWNTHSARRRLICVIGMAVFGQISGNSLSSYYLVNMLKSAGITEERRVLALNGVNPALSFLGAILGARMTDVVGRRPLLLYTIVFASVCFAVITGTSKMATDDPTRTAAANATIAFIFIFGIVFSFGWTPLQSMYIAETLPTATRAKGTAVGNFSSSVASTILQYASGPAFEGIGYYFYLVFVFWDLIEGAIMYFYFPETKDRTLEELEEVFSAPNPVKKSLEKRSAQTVLNTVGAAQNEKLARDV

SEQ ID NO: 3330 - DNA, 1542 bp, Myceliophthora thermophilia
atgcctgcggttggtagcgacgacggggctgcgtttccggaacggcaaccccttttggcggggaccgcaagcaatgagccgaccacagggaacccgaccgccgccaccgccgcggtgagcgacggacgggtcgacggcggccgtgacgtgcgctacgtggacgccgaaaccgaggagcggcttgcggatggtagtggtggtgtcgccgccgcggggtcgttcgcgcgcaacctgggcgccatcgaggcgttcgggatcgtggtcagcatcgtcatcggcagcggcgtctttacgtctcccgggtccatcgacaccaacgtgccgtcgccgggcgttgcgctgctggtctggttggtgggtggggtgcttgcgtggacgggagcgagcaccatggccgagctaggcaccgcaatcccgggcgaggggggtgtgcagccatatctcaagtatatctacggcgacgtattcgggttcctggccgcctggacatgggtggtcgccgtcatgcctgccaccctggccatcctgagcatcgtgttcgttgagagcatctactcggccgccggggtaacgggcgaggggggcaggatcgagcacaagctgctctccatcgtcgtgctagcctgcattggagtagccaattcgatcagcaccaaggcgagcacgcggctcaataacttcttcgtcgttaccaaattcatcaccattgcagcactcgtcctggccggtatcgtcgttgtcattctccagcttgccaacccaaagagccaagtcggcggcggagactgggtcaagaagccatggttcggttaccgcgacagtgtcaacccggacggcagtgttacacactgggacgacttgagccagtgggatctgttcggacacctctcggcggctttcattatcctgtgctttcttacagctaatgcggcatactacactctgctgccatggcgtattgtctcgacgacagacagtgtcgcggtgacggccatcactcgccttctcggccgtggtttcggatttgtggcggctattttgatctgcctggttgttgcgggttcgctgctcggcaactcgttcgtggccggtcgaatgacggttgccgcggccaaccagaactggctccctcgcctcctcagcattgtcggtcagcttggagccgaacgaaaggtttcagaagacgaagttcagaaagcgccagactctgatgcgcccatcaatgccatcgttttgtcgacggtccttggagcggtttacatcttgctgggcaacttccgcgccttgctgaccttcaatggactgggcgagtacaccttcttcttccttaccgtcctcggcgcgattctccttcggtatcgtcagccccaactagagaggccctataagcctttcgtcataactcctcttgtcttcgcgctcgtgagcgggtttgtggtcatccgtggagcggtgtttgcgccaacacaggcagttgttttgatcgggctttgggggctcggactcttgttctactggactcgaagacgctactaccagtag

SEQ ID NO: 3331 - protein, 513 aa, Myceliophthora thermophilia
MPAVGSDDGAAFPERQPLLAGTASNEPTTGNPTAATAAVSDGRVDGGRDVRYVDAETEERLADGSGGVAAAGSFARNLGAIEAFGIVVSIVIGSGVFTSPGSIDTNVPSPGVALLVWLVGGVLAWTGASTMAELGTAIPGEGGVQPYLKYIYGDVFGFLAAWTWVVAVMPATLAILSIVFVESIYSAAGVTGEGGRIEHKLLSIVVLACIGVANSISTKASTRLNNFFVVTKFITIAALVLAGIVVVILQLANPKSQVGGGDWVKKPWFGYRDSVNPDGSVTHWDDLSQWDLFGHLSAAFIILCFLTANAAYYTLLPWRIVSTTDSVAVTAITRLLGRGFGFVAAILICLVVAGSLLGNSFVAGRMTVAAANQNWLPRLLSIVGQLGAERKVSEDEVQKAPDSDAPINAIVLSTVLGAVYILLGNFRALLTFNGLGEYTFFFLTVLGAILLRYRQPQLERPYKPFVITPLVFALVSGFVVIRGAVFAPTQAVVLIGLWGLGLLFYWTRRRYYQ

SEQ ID NO: 3332 - DNA, 1047 bp, Myceliophthora thermophilia
atgtcactaccggcgttaccacggcgcgcggcgtacatcacgcttaacaacccccggcggcgcaacgccctctccttggccgaactccgctctctccgggaccagctcatcaaagcaaacacatcacccaccaccggccgtaccctcctcctccctcccttcaagccccatctcctgtctaggcttgaacagtcacacgcccgcctcgccacggcggacaagaaaacggacgacgagaacgagccggactacagctggctcgtctcctcggcggcctttgcccgcgcccgcgccggcctgccatccgtcctcgtcctcgcctcgcacgggcccgtcttcagctcaggccacgacctgcgcgagctgcgcacgcagctggcgccggccgaggtggccgagacgttccggctctgcgccgaggtcatgacgctgatccggcgcagtccggcgctggtggtgggccgcgtcgcgggggacgccgtcgccgcggggtgccagctcgcgctggcgaccgacctgcccatcgcccacgccggcgtgcggttccggctgcccggggcggcgctcggcctgccctgctccagccccgtcgcggcggtgagccggcggggggggcacgccgctgcgctgaggatgctgctcaccgccgaggacgtgccggcgcgcgggatgggggccgcggtcaagctggtcgaggatcacgacggtggtggtggtggtggtggagacggcccgggcggcgcggagagccgggtgcgagccctggatgccgaggtggagcggacggtggggaggctggtcggcatgtctccgcagcagaacgccatggggaagtgggctttttggacgcaggctgggatgacggggcgggactatgtcgggccggacggggttacggtcgaaggaagcggcggggatggatttcaggatgcggtcgagtgggcagggagggtgatggcgttgcacgcgaagagtgaggacgcgaaggagggaatggatgcgtttctcgagaagagatcgcccgtttggtacgggttcgagcaataa

SEQ ID NO: 3333 - protein, 348 aa, Myceliophthora thermophilia
MSLPALPRRAAYITLNNPRRRNALSLAELRSLRDQLIKANTSPTTGRTLLLPPFKPHLLSRLEQSHARLATADKKTDDENEPDYSWLVSSAAFARARAGLPSVLVLASHGPVFSSGHDLRELRTQLAPAEVAETFRLCAEVMTLIRRSPALVVGRVAGDAVAAGCQLALATDLPIAHAGVRFRLPGAALGLPCSSPVAAVSRRGGHAAALRMLLTAEDVPARGMGAAVKLVEDHDGGGGGGGDGPGGAESRVRALDAEVERTVGRLVGMSPQQNAMGKWAFWTQAGMTGRDYVGPDGVTVEGSGGDGFQDAVEWAGRVMALHAKSEDAKEGMDAFLEKRSPVWYGFEQ

SEQ ID NO: 3334 - DNA, 2691 bp, Myceliophthora thermophilia
atggtcgcgcgcctcgagctagcggtggatgcccaggagctcgccaacgagcagcgtgcactcctcgacttgatcgacaagctgcagttcgcccaactggacaatgtcaagctgccgcagattgtcgtggtgggtgatcagagcgccgggaagagctccgtgctcgaggccatcactggcaccccgtttccacgagatgccggcgcctgtacgaggttcgctaccgagatccgcctccggagggcgccccagcagagcgtcaccgtctccgtgattccggacaagaaccgcagctttcccgagcaggagaggctgagacagtttggcggaaccgttcgtgccgagatgccctttgagcagttgatgaggagcgccgtcgacctcattgcccccaaggacgtgccgggccgctttgccgcccgcgatatcctcgtcgtcgagaagcggggcccggatatgccgctcctgactcttgttgacctgcccgggttggtccgaaacgcaaacaacgaccagtccctcgaagacatcaggaccatcgaggcgctctcggaccgctacatgaagagttcccggaccatcatcttggccgtggtaggggggaattctgactacgtccaggcgccgattctcaccaaggcccgtcaattcgacccggacgggcacagaacgattggcgtcttgacgaagccggacctgaccgagttcattggtttggaggataaattcatcgatctggtgcaaaacaaggacaagcgcaacgacttcaagctcggctggtacgttctgctaaacccgggaccccgcgaaccgggccagctctggccgacggccgaggagcgccgacgagccgaggccgtctttttcaacagcgggaaatggagctcgatcccgccgtccaactgtggcgccatcgcgcttatgcggcagctcagcctccagttgcagcggcatatcggcagacacgtccacgtccttcgcaagcagattcagaaagcgctcgatgactgcgaggccgaactcaagtctctcggggacgccaaagatacgccggaggagatgcggaccgagttggtcgagctcttctcggcatccaaggagctggtgatccccgccgtctacggcttctacaagaatcctcccaagaagaatttctttcgcgtaaccgcagacccgagaggcaccccggctcagaacctacgggcccgcgctgcggaggagaacgaccgcttcgcgatgggggtacgggcccacggccgcaagctcgccttctctagcgactcttcccctgatagcagcgccaagcgcgagttcgtcaagcaggaagtcgagttgctgctgcgacagatccgcggctcagagtttcccatggatccaaagccgagggccgtctacatgctcttccagaactactcggagaactggcccaaactagcccaggagcacaaggacaacttggccgtcgtctgcgacgagttcctgggcgagttggtcgactacgcctggccgaagcgcatgcgggcaccgctccgccggcattttctggagcctcgcatgaaggaactcatggcgaaggctcagcacgagctggacctcctgacccaggacatgagcctcgaggtccaaccgtacgaccccgagtacgaagaacggttgaggaactggcacctcatgacgacgcaggacggcgccaccttctctgaggccgaggaggtgctcgagaagatgctgatatactatgacctggccgccaagaccttcatcaggaacaccattactcaggtcatcgaacgccatctcctccagggcatgtacagcatcttcaactcggtcgaggtgctgggtctgagtaccgacgtggtcgaggccatcgcggcggaaaataaagagaccagggataggaggcagacgctcagggtacaaaggaaggccattcaagaggccaaagagatctgtgctggcattgccatgcgaaaagaactgagaagagtaagtcgcactcgccacgagtccgcaggacgcagctcatcgcttcttcttcaacagtacgccgaaggtggtgagagcgatggcgcgagcacttccgatgaggaaggatccacggcagaggagaagccatctcccgcaaggcatcgcccgagcccgtccgccacgcgacgtccgtcccggcgacacaggccctcgggcggggagatccacagcaccggcaccacctcgacgcgcgggctcgacgccgctagcggccaccaccgacaccagcactcccacgagcagactccgacccacgcctattaccccacgcccagccccgaccgccaccgtcgcgtggtggatgatgacacgtacattaccgcaccacgccctccgcagcaggcgccgccgccaccgccgccaccgccacctcgtccaggtaaagtgcggccggaagaggatcagcagcagcagcagcagcagcagcagccccaagccttctactgctcgccggcccctggccgggccccggcgaatcccagaacgagccagccgcttgcttcttcgtcttcttcgtttgccgcaggaacggtgccggcgcccgagccgcgctatgcgagcaacggaccttattccagcaacaacccgtacgccccggcggagacggccgagttcgaagcggcgcggaggcaggcgaagaaggtttctgggagagcctaa

SEQ ID NO: 3335 - protein, 896 aa, Myceliophthora thermophilia
MVARLELAVDAQELANEQRALLDLIDKLQFAQLDNVKLPQIVVVGDQSAGKSSVLEAITGTPFPRDAGACTRFATEIRLRRAPQQSVTVSVIPDKNRSFPEQERLRQFGGTVRAEMPFEQLMRSAVDLIAPKDVPGRFAARDILVVEKRGPDMPLLTLVDLPGLVRNANNDQSLEDIRTIEALSDRYMKSSRTIILAVVGGNSDYVQAPILTKARQFDPDGHRTIGVLTKPDLTEFIGLEDKFIDLVQNKDKRNDFKLGWYVLLNPGPREPGQLWPTAEERRRAEAVFFNSGKWSSIPPSNCGAIALMRQLSLQLQRHIGRHVHVLRKQIQKALDDCEAELKSLGDAKDTPEEMRTELVELFSASKELVIPAVYGFYKNPPKKNFFRVTADPRGTPAQNLRARAAEENDRFAMGVRAHGRKLAFSSDSSPDSSAKREFVKQEVELLLRQIRGSEFPMDPKPRAVYMLFQNYSENWPKLAQEHKDNLAVVCDEFLGELVDYAWPKRMRAPLRRHFLEPRMKELMAKAQHELDLLTQDMSLEVQPYDPEYEERLRNWHLMTTQDGATFSEAEEVLEKMLIYYDLAAKTFIRNTITQVIERHLLQGMYSIFNSVEVLGLSTDVVEAIAAENKETRDRRQTLRVQRKAIQEAKEICAGIAMRKELRRVSRTRHESAGRSSSLLLQQYAEGGESDGASTSDEEGSTAEEKPSPARHRPSPSATRRPSRRHRPSGGEIHSTGTTSTRGLDAASGHHRHQHSHEQTPTHAYYPTPSPDRHRRVVDDDTYITAPRPPQQAPPPPPPPPPRPGKVRPEEDQQQQQQQQQPQAFYCSPAPGRAPANPRTSQPLASSSSSFAAGTVPAPEPRYASNGPYSSNNPYAPAETAEFEAARRQAKKVSGRA

SEQ ID NO: 3336 - DNA, 240 bp, Myceliophthora thermophilia
atgtcaaccacacaggtcgagaaacccaccacaaccgccgtcgccgcaccggaaacaatgactaaggaagccgccaacaaccatgccactccagccgtcggcgtccagcaccagccatacggaggttcctacctctgcaagtgttgcctttgcacgtgcggggaggcggtggagtatcctggcgacacgcgcatgaacaagacagggggcgtgagttatggcgccgagatacgggattag

SEQ ID NO: 3337 - protein, 79 aa, Myceliophthora thermophilia
MSTTQVEKPTTTAVAAPETMTKEAANNHATPAVGVQHQPYGGSYLCKCCLCTCGEAVEYPGDTRMNKTGGVSYGAEIRD

SEQ ID NO: 3338 - DNA, 834 bp, Myceliophthora thermophilia
atgcccgttatcatcacaccagaccctctgatcacggggggcgcgactccaaataccccattctccgctcctccttcaccttcccagaccacggccaacgacgcttcaccctccttcgtcgcacccgccaaaaacggcctcacccacgccgtcatccgcgcctggcagcaggacctgcacctcaaactgcggcccgacgacgtctggctggccatcctaacccaattcaccttcgccgtcaacgcctacgccgactccctccgctctctctttgtctcccatcagggccggctcccactcgccctcgacgctagccccgacagcgtcgaaaccgtcgacgtgggcgccgtcgcgcggcagctggcggccatggtccggcagaagctcaaagaccccggcatcgctacgaccctcctccccgagtttaccaccacgacctcgcacgaccgcgccaccgcggccatggtcttcctcggcaccatgcgcgagtactttagctacgatatccacttcggctgtagcttcccctccgtgaccttgctaggcgagcggcgcgactgggccgatatactcgcgcgtatagcctggctcgcgacggtggttggcggccgggaagaggccgttgcggcgtgggcggcgcggttggccaaggtgctcgagtacatggtggcgagcttcgaccggccgggcgacgcagacgtgaggcggttctggaccagcgcggtgcaccaggcgggcgggcgctcgtcgggcgccgtgacgacgctgtcggggtggctgacggcgttttgttggtggagtgcggacggggagaggggtgaaggattattatag

SEQ ID NO: 3339 - protein, 277 aa, Myceliophthora thermophilia
MPVIITPDPLITGGATPNTPFSAPPSPSQTTANDASPSFVAPAKNGLTHAVIRAWQQDLHLKLRPDDVWLAILTQFTFAVNAYADSLRSLFVSHQGRLPLALDASPDSVETVDVGAVARQLAAMVRQKLKDPGIATTLLPEFTTTTSHDRATAAMVFLGTMREYFSYDIHFGCSFPSVTLLGERRDWADILARIAWLATVVGGREEAVAAWAARLAKVLEYMVASFDRPGDADVRRFWTSAVHQAGGRSSGAVTTLSGWLTAFCWWSADGERGEGLL

SEQ ID NO: 3340 - DNA, 1584 bp, Myceliophthora thermophilia
atggcgaccgaagaagatatcaatgctttcgtgggtattacgggtgccaaccgcacggctgcagagcgcatattggatttgtgcagctcagaccttgagcaggcggttcaactttggttcgccgacgaagatctgcaacaatcgctgagcaatgccggcccttcgacaaccacaactgccagcaggtccagtaggcctagtcgcccacagatcggccgcgaggatgcccagggcgttattcatatcgattcagatgacgacgtgcccatggttgaggatgaggctgacgatggcgacgaagctgccggtgtagcccggcgcgcccaggaggaggaagatgcagcgatggcacagaggcttcaggaagagttgtactccggccagaacgcaggcgaaggcggcgtgcgagcccccattgcccgaaccactgagaccttggttgccccggcctatggcgatgatgacgatggcgggcacgccgctattctcgagcagatccgaaggaggcaacaatctcgagcccggcctagcaacccatttgcccagtccgtttgggaggacagctctcgaacatcgcgtcctgcatcgctgggtggatctgaaaccagccgagcatcccgtctggcagaactcttccggccgccatacgatctaatgtcacacctcagctgggacgatgctcgcgacgagggcaaagacaacaagaaatggattctggtaaaccttcaggacatgtctgacttcaactgtcaagctctgaaccgcgatatctggaaggacgaggccatcaggtctctcgtgagggaaaacttcattttcctccagtacgacaagaacgactacgcggctgagcagtacatcacgttctacctccccaacgaagctcaccaaaacccaaacaactacccgcacgtctccatcattgacccgcggaccggcgagcaggtcaaggtgttcagtggcacccctttcccaaatgcgcttgaattccacgctcagcttgtcgagttcctcgaccgctatagcctttcggcaaacagcaagaatcccgtccccaaggtcaagcggcccgagcgcgcgatagatgtggaccggatgacggaggaggagatgctcgagatggctttgcagaacagtttggacgcgaacggcggccccaaggaaccaaacatacacgaccccgacgagcttaccaaagtaaaggaagaaaagggcaaggagcaggcggagccggcggggtcgacatctgccgagccggaagcttcttcggcgcaagaatcggcgttcgccaggataccgtccgatcggccccacgtcgagccgccagccgatcccaagacaacgacgaggttgcaggtcagatatccgccagggcgcatcattcgccgtttccggctcgacgaacccgtctctcgcatctacgagtggctcaaggcggagccgctgccgggcaaggagggcgtggagtttgagctcaagtcgatgccgccacaaggcgccaatctgattgaccatctcgacgagaccattgaggaggctggtttggccaatgccgtggtcatgctcgaatttattgaggactaa

SEQ ID NO: 3341 - protein, 527 aa, Myceliophthora thermophilia
MATEEDINAFVGITGANRTAAERILDLCSSDLEQAVQLWFADEDLQQSLSNAGPSTTTTASRSSRPSRPQIGREDAQGVIHIDSDDDVPMVEDEADDGDEAAGVARRAQEEEDAAMAQRLQEELYSGQNAGEGGVRAPIARTTETLVAPAYGDDDDGGHAAILEQIRRRQQSRARPSNPFAQSVWEDSSRTSRPASLGGSETSRASRLAELFRPPYDLMSHLSWDDARDEGKDNKKWILVNLQDMSDFNCQALNRDIWKDEAIRSLVRENFIFLQYDKNDYAAEQYITFYLPNEAHQNPNNYPHVSIIDPRTGEQVKVFSGTPFPNALEFHAQLVEFLDRYSLSANSKNPVPKVKRPERAIDVDRMTEEEMLEMALQNSLDANGGPKEPNIHDPDELTKVKEEKGKEQAEPAGSTSAEPEASSAQESAFARIPSDRPHVEPPADPKTTTRLQVRYPPGRIIRRFRLDEPVSRIYEWLKAEPLPGKEGVEFELKSMPPQGANLIDHLDETIEEAGLANAVVMLEFIED

SEQ ID NO: 3342 - DNA, 5670 bp, Myceliophthora thermophilia
atggccgcaccagttgatgctcaacgagagctcgatctcatagagaaagctgaatggcgtattctctccgcatcttcggacgaggcgaagctccaggggctcctgaaggtctatctcgctcccctgttattgaaggcgggcagtgagcatgtctcggttcggaacaaggtgatatctacatgccagaccattaacaagctggtcaagtctccggggattgtcctccctgtcgccgccctgcttgaccagttcaaagccgcggagcagccgcttatcaggcactttgacctgatttacatacaacacagcgtggggaagctgagcgccgacgagcatcgagctctcgttcccaaagcgctccgcggcatcagcaagggctcaacggcctccaccagccaactcttcaacgttgtcctgcgcatgcttgctgcggtgaaaataccatcacgtgggagcaaggaagatgttgagttccgggaagccatggggctggcagaccccgaggacgccagatttgtcgccgactggttcggaaagctgttgcttttgaaggccaatgtgtcagggcaagctccatctccgggcttgtcagagtcggatatcagtttcctcaccctcggcaaaccggcggtctgggaccccgcggcagggggactgaacctggcagaaacccgaatacaagtcgcgaatctgttggctagcggcgcctttaccgacgaggagcggtttattccggccatatacgcggcgtctagctcagattaccgcatctcaagcattggtgacgacttgctgaagaggagttccgtctccctcgaagataaagccctggttcagaagctctacagggcacactcagcgctgccggcgccatatcgaattcgcatactcggaatcttgagcaagtcagagattgctacgactttcacggatgagattcttgcggccttccgccaaaacgtcgacgtaccggccgagtctagcgacgccatgcaggtcgatggccagcaggttgtcaagacctctggcctcgagcgctacaagctccaccgggcactgttcgagttcatcaactgggttgctcgaatcgggtctggaaagaccgattacaacaagatcggcccgccactggtgaatctgctcagggactttatcagggaccaaggctggccgaagcctgcaacccaagccctagacgagagcaccctgcgctccagggcgtatgagaccatcgggatccttgccaagggagcgtccatgtcggatagtgagcgactctccttggccggatggctcttccgctccctttccgaggacccgacctctgacgttgttgtcaacatcgacggcgcgctctcgagccttacaagcctgttcaagcccccacacagtttctccctcaacacccagctgcaatctatccttttgacctacatgacgcttaaggacgatgatggtgatgtcgtccggagtgctcggcacgccgtcacaaagtgggcgaatcattgtcttccattctccgacgttttggcacgctggatcgacatcctcgctatcgccggccgcccggacgagcgcagcgatgtggtcgaggaaggtcagaaagggctggatccctggacatactatgccaatgacgacaggacaggggttctgccggactggaaggaaatggttcaaatgtttttcagggagcccatcgcccccctcaatgctgcttccatatttgctggccgcggccggggcgtggacgtggacgacaagggcccgttcgtaaacttctcctcccaatcgctcccggcgtttcccgtcgctgtcaattattgcaagcagattatgttcctaacagcgcttggaaaatttcggatcgagccgggctgggaacggcggctcggggctctcctgcactctgacctttctacccggctaaccgtacgggaatacctttccgcatttacccgccaagagcattctcttttccaacttctgcgggctgcatttgatgggatgatcatggaggatacaaggatcgctgagccatgtgctcggtcttttgtggatattgcatctttatcccctagggccgttttggaaccactggccttccggtccaacgagctgctaaccttgatcaaatcgaacaagaaggagcttcggctcctcggttcgcgggcatttgggatacttgctgctcatcccagcaactctcaacactctgtcgacaatttcacggaagccttgatggccatcgcaaaggggctcgccacggctgttggagcggagctgaacgccgtcgagggtgcttttcttgctcttggacacctcgtctcgcggcgcgcgtactatgctgctgctgggaaggacggtcctgctgagggtgttgctagtcacggccagatattcccatctcttacgtctgtttcatccaaaccaacagcaactcaggaggcattattcgaagcgtacactcagctctggactgcagccatccttgctgcccctggcggcagccagagtgcagagggaccccaggacctctcgacaacattgacaaaggatttcatcgacccactagtcatgcacgcaaagaagggcaacgagaaggccataactgctcttggaaggcttgctatagcacttccggaaacaggagcaacggatgtgagcaccaccaatgatacgctgagttcgatactcgagtccctctactccctgtacgagcttaggcaggccgaagtgcacttcgcggtcggcgaggctctcgcagcagcagtcgcttgctgggatgcggaaattgtccggctcaccctcgatgttcagggagagggaacaggctttcaggtgcccaagcgcggggcacgcctcactttggtcttggacaagctcctggctgactgcaaaactacgaagccgtccttgctaaaggcgtcttgtatctggctattttgcctcatccaacattgctcccatttggaggaggttcagtcacgactcagggagtgccaagcggcctttatgcgtgtgctcagtgcgcgggatgagctcgttcaggagacggcctcccgaggtcttgcactcgtatacgaaaagggcgactcaggcctaaaaggagaactcgtccgcgatctcgtggcagcattcaccggcgcagggccgcagctcaaagtcgaccaagaaacccaactcttcgaggccggcactctcccaaccggtgagggcaagtccatcacctcatacaaggacatcgtaagtcttgcgaacgaagtcggcgatccgagcttggtctataaattcatgcaactcgcaaccaatgcagccacgtggtcgacccggtcggcgtttgggcgcttcggtctcagcaacaccctctccgactcggagatcgatcccaaactctaccccaagctttaccggtaccgcttcgacccgaaccagaatgtccagcgatccatgaacgatatctggaaggcgttggtcaaagatccaaagaccgtattggagacgcacttcgacgccatcatgcaggacctcctgaagagtatctttggaaaagagtggcgagtccgcgaggccagctgcgctgccatctccgacctggtctctggacagccgtttcccaaatatgaaaaatattacaaagacatctgggcatcggcgctcaaggtgttggacgacgtcaaggcgactgtccggaacgcggcgttgcacctttgtatctctctctcgacgactctagtgcggcaactcgaggaatctggttctacatcaacagccaaggccatgatcaacgaggctctccccttcttgctgtccgaaaagggcattgaaagcagtgtcgaagacgtgaagctgttctcgacgatcacggtcatgaagatcgccaagagcggtggtgacgccctaaggccctacataccaacgatgattccgcacctgctcggcctcctgagcacgatagagccccaagctatcaactaccactaccagcgcgccggcgaggagaaccgcgagaagattgacaagctccgcagcgcggccgtctcgcacagccccatcgccgaagctatcgacaattgcctccgcagtgtcgacgcggacgtgatgaaggagctcgctccgaagctccaagaggcggtcaagaccgccctcggcatgcccaccaagatcggctgcgcccgagtcctttccaccctcgcgacccgccacgcgctctccttcgccccttactcgccggccttcctcagcctcctcgaaaaacaggcactcgatcgtaacgacgaagtgagccagaactacgggcgtgcggccgcctacttggtacgggtcgtgccgtctcctgacaccaagacgcgttttgccgaccgcctcgtgtcgctctatctcgcagccgaggacgagacgcggcggcagaaggtggccgacgccgtcctggcgctggccaagatctccccggaccacttcgccgccctcgagacgcagctcctgccgttcgcgttcctggcccgccacgacacggacgagtatgtgcgccgggccgcccgcgaagcctgggacgcccatgcgggcagcaccaatctcactgttgtgcgctacctgcgcgagattgcggcgctggccgcggcgtgcctggacacggcgcagtgggcactccggcacgctggcgccctggctgtcgccgcggcggtcggtgccgtcgtcgccgccggggaggcgtccgggagggccaacgccgaagcgctgcgggaggtgtggcccgtgtacgaccgggcgctggcgctccgcacgtttgagggcaaggaagcgctgctggagccgctccccgggtttgtcagggcgagcaaggtgctgcgggagggtggcggtagcgaggaggcggtggcgctggcagggcagctgcacaagatcgcggtgcgggaggcgaagcggaacaacgatgcctaccggccgcacgcgtttgcgtgcttgtggaaggtcgccgcggccctggaagacctcgagatggtcggggagatcgcggacgtcgtgggggagtacttggcggcgctagtggtcggggggggagagcaggggggtgtcgatgccatggacgtcgacccgcccgaggagtccaagcggccgagaggagacctgaatctcaagagccggacggcctgggcggcggtcgaggcaatcgtgagggggtacaaccgggtgcggatgaagaaggatcccatagcggtcctccaggacgccatcgccgccctcgagagcgctgctggcgaaggatccaagacgcctaacatccggtcgccgggcatcgcaaggccggagcttgcaaccattaggcggatgttttggtatgactgcgttcgagagattctggaggaggcagcgagcggagcggccgttgctgagggcgatttcgataaggagcgccacggacgggatgttgtcaagtggttcctgaacacgctagacctcgctacagacgatgctggcactgaaggccagcgtctggcaaaggccaaggcagtaaacgctacactacggctggggaaagcacaggcggggctctcggccgaggcagattggaagtccgaagtgaggagccttgttgacaacgctgtggccaccgagaggtcgctcgaggtgcagaaggcttggaaggaatgtctcgatctgcttaagtaa

SEQ ID NO: 3343 - protein, 1889 aa, Myceliophthora thermophilia
MAAPVDAQRELDLIEKAEWRILSASSDEAKLQGLLKVYLAPLLLKAGSEHVSVRNKVISTCQTINKLVKSPGIVLPVAALLDQFKAAEQPLIRHFDLIYIQHSVGKLSADEHRALVPKALRGISKGSTASTSQLFNVVLRMLAAVKIPSRGSKEDVEFREAMGLADPEDARFVADWFGKLLLLKANVSGQAPSPGLSESDISFLTLGKPAVWDPAAGGLNLAETRIQVANLLASGAFTDEERFIPAIYAASSSDYRISSIGDDLLKRSSVSLEDKALVQKLYRAHSALPAPYRIRILGILSKSEIATTFTDEILAAFRQNVDVPAESSDAMQVDGQQVVKTSGLERYKLHRALFEFINWVARIGSGKTDYNKIGPPLVNLLRDFIRDQGWPKPATQALDESTLRSRAYETIGILAKGASMSDSERLSLAGWLFRSLSEDPTSDVVVNIDGALSSLTSLFKPPHSFSLNTQLQSILLTYMTLKDDDGDVVRSARHAVTKWANHCLPFSDVLARWIDILAIAGRPDERSDVVEEGQKGLDPWTYYANDDRTGVLPDWKEMVQMFFREPIAPLNAASIFAGRGRGVDVDDKGPFVNFSSQSLPAFPVAVNYCKQIMFLTALGKFRIEPGWERRLGALLHSDLSTRLTVREYLSAFTRQEHSLFQLLRAAFDGMIMEDTRIAEPCARSFVDIASLSPRAVLEPLAFRSNELLTLIKSNKKELRLLGSRAFGILAAHPSNSQHSVDNFTEALMAIAKGLATAVGAELNAVEGAFLALGHLVSRRAYYAAAGKDGPAEGVASHGQIFPSLTSVSSKPTATQEALFEAYTQLWTAAILAAPGGSQSAEGPQDLSTTLTKDFIDPLVMHAKKGNEKAITALGRLAIALPETGATDVSTTNDTLSSILESLYSLYELRQAEVHFAVGEALAAAVACWDAEIVRLTLDVQGEGTGFQVPKRGARLTLVLDKLLADCKTTKPSLLKASCIWLFCLIQHCSHLEEVQSRLRECQAAFMRVLSARDELVQETASRGLALVYEKGDSGLKGELVRDLVAAFTGAGPQLKVDQETQLFEAGTLPTGEGKSITSYKDIVSLANEVGDPSLVYKFMQLATNAATWSTRSAFGRFGLSNTLSDSEIDPKLYPKLYRYRFDPNQNVQRSMNDIWKALVKDPKTVLETHFDAIMQDLLKSIFGKEWRVREASCAAISDLVSGQPFPKYEKYYKDIWASALKVLDDVKATVRNAALHLCISLSTTLVRQLEESGSTSTAKAMINEALPFLLSEKGIESSVEDVKLFSTITVMKIAKSGGDALRPYIPTMIPHLLGLLSTIEPQAINYHYQRAGEENREKIDKLRSAAVSHSPIAEAIDNCLRSVDADVMKELAPKLQEAVKTALGMPTKIGCARVLSTLATRHALSFAPYSPAFLSLLEKQALDRNDEVSQNYGRAAAYLVRVVPSPDTKTRFADRLVSLYLAAEDETRRQKVADAVLALAKISPDHFAALETQLLPFAFLARHDTDEYVRRAAREAWDAHAGSTNLTVVRYLREIAALAAACLDTAQWALRHAGALAVAAAVGAVVAAGEASGRANAEALREVWPVYDRALALRTFEGKEALLEPLPGFVRASKVLREGGGSEEAVALAGQLHKIAVREAKRNNDAYRPHAFACLWKVAAALEDLEMVGEIADVVGEYLAALVVGGGEQGGVDAMDVDPPEESKRPRGDLNLKSRTAWAAVEAIVRGYNRVRMKKDPIAVLQDAIAALESAAGEGSKTPNIRSPGIARPELATIRRMFWYDCVREILEEAASGAAVAEGDFDKERHGRDVVKWFLNTLDLATDDAGTEGQRLAKAKAVNATLRLGKAQAGLSAEADWKSEVRSLVDNAVATERSLEVQKAWKECLDLLK

SEQ ID NO: 3344 - DNA, 306 bp, Myceliophthora thermophilia
atgactcataacgacacatcagttacggctgaaaacttgcaaattgccgattccgtgacagcttcgaacgtgacgcagcggaagtacagaacacaacaactcttgacctccctggaagaggttgaggtggtacccagttcagagcgagggacgttccgggaagatcccgtccgaacgtggaagcgcatgaacccggatttgaccatcgcgtccggcctcgggatatcgcgctgcccagtaaggggcgctactcgtgaagatacacacggactccggcgacggcggcagcggccacaaggcacctaa

SEQ ID NO: 3345 - protein, 101 aa, Myceliophthora thermophilia
MTHNDTSVTAENLQIADSVTASNVTQRKYRTQQLLTSLEEVEVVPSSERGTFREDPVRTWKRMNPDLTIASGLGISRCPVRGATREDTHGLRRRRQRPQGT

SEQ ID NO: 3346 - DNA, 348 bp, Myceliophthora thermophilia
atggttcagaacggaggtgaccttgacctcgacaccgacatggataccaacgagttggaccagagagacaaggctgctcaagctcgaattaaggaactcgagaatcgcgaaaagtactcgcagaagttggttaacgaggcctacgccaaaatcggagcgctcgagaccgccaaggcaagccgcatcaagatcgaactacctggtaaatacggaggaactaaggaggatctcgtaggattcctgacaaacctccgatcctacttccggctcaataacgacaagtttccggacgataaagccaaagtcctctatgtagccacgagactagagggcaaggcactcagatag

SEQ ID NO: 3347 - protein, 115 aa, Myceliophthora thermophilia
MVQNGGDLDLDTDMDTNELDQRDKAAQARIKELENREKYSQKLVNEAYAKIGALETAKASRIKIELPGKYGGTKEDLVGFLTNLRSYFRLNNDKFPDDKAKVLYVATRLEGKALR

SEQ ID NO: 3348 - DNA, 249 bp, Myceliophthora thermophilia
atgaccaactcgtcctccacctattcacaccccaaaggaagcagctccaaagccaagtccaaagacaagcgcaaggagaagtcggtcaaaaaggagagctcgagcgaagaagacaaaaccaaaacgaccttcagctgcgacccgtacgcgatgtctctcagcaacctcgcaggactggagagatacatgcaggagcccgcctatgagtctgcttggaaccctgtgggagcgacttctggaggggaataa

SEQ ID NO: 3349 - protein, 82 aa, Myceliophthora thermophilia
MTNSSSTYSHPKGSSSKAKSKDKRKEKSVKKESSSEEDKTKTTFSCDPYAMSLSNLAGLERYMQEPAYESAWNPVGATSGGE

SEQ ID NO: 3350 - DNA, 987 bp, Myceliophthora thermophilia
atgagcggctacgagttgcccggcatgacgcgcccgcgggggtcgtcggccgccagcgaggatagcacgggcacggtgcgcgagcaggagctggggagcatgtacgactacctggcaaaggtcatactgctggggccgagcgggacgggcaagtcctgtcttttacatcgcttcgtaaagaacgagtggcgcgttctctcctcccagacgatcggcgtcgagttcgcgagcaagatcatcaaggtcggcactggggcccgaaggaaacggataaagctacagctggcacgcgctaacgcccctccccagctctgggacacggcaggaaccgagcgcttccgctccgtatcgcggtcctactatcgcggcgcggcgggggctatcctcgtctacgacattacctcgcgcgcctcgttccaagggctgcagcccttcctcaacgacgcgcgggcgctcgcgtcgcccaacctctccctcctgctggtcggcaacaagctggacctggcgggggacccgctcgtagacacgggcgtgccaccgccgacccccggcggcgccacgccggtaccgtcgtcgtactcgtccacgtccacgtcgacgatccacccgggcctgggcgcgcagctgaaggcgacggtggcgcccgacggccgcgaggtgtcggcggtcgaggcgagccggtgggccagcacggtgcagatccccgtcgccatggaggtcagcgcgttcagcggggagggcgtcgacgaggtgtttgggcgcctggcgcgcatgatcctgaccaagatcgagctcggcgagatcgacccggacgacccgatgagcggcatccagtacggggacgcgggcgccctgtggaacgccggcgcgagcgacgggggcagcatcaagagcaccatcacggcggacgacgtcggcgtggctggccctagatataataatggcaaggaggcttgggcatcgggccggcctccgcgcgtcgagtga

SEQ ID NO: 3351 - protein, 328 aa, Myceliophthora thermophilia
MSGYELPGMTRPRGSSAASEDSTGTVREQELGSMYDYLAKVILLGPSGTGKSCLLHRFVKNEWRVLSSQTIGVEFASKIIKVGTGARRKRIKLQLARANAPPQLWDTAGTERFRSVSRSYYRGAAGAILVYDITSRASFQGLQPFLNDARALASPNLSLLLVGNKLDLAGDPLVDTGVPPPTPGGATPVPSSYSSTSTSTIHPGLGAQLKATVAPDGREVSAVEASRWASTVQIPVAMEVSAFSGEGVDEVFGRLARMILTKIELGEIDPDDPMSGIQYGDAGALWNAGASDGGSIKSTITADDVGVAGPRYNNGKEAWASGRPPRVE

SEQ ID NO: 3352 - DNA, 1185 bp, Myceliophthora thermophilia
atggcaccatacatgtcagtcgagcacgcgcaccggacatacggccccgtcgacagggaagccctccacagccacctctccaagtcggaacgcggcctgctgcgcatggggctggtcaagtcggagcaatggcggcggctgcccgccgaagggctgtaccagatcgtcatctccgaggtgctcgacaacggcaagacgtaccccctggagcgcaacggagcgagggcgttctccgtgacgtcggtactggacctcgggttaagaatgctggagagcgaccgtgggaggaccgctctcgccaacttggcgaataaggccatctgcgtctggcgggaacggcccgtacccggccccgtggtcgagccgtggtacattgacattccggctactgtagacgacttcctccgctgcgtgcggtaccgcttccccattgtgaagctggacgaccgaaatggtttctgccgtgaagaggagaacgagacgatgccgtattcgtgggtcgacgagtactcgacgctggagcactttgacttcaaccccaaggccgctgcgctgatggagaagctctactggacccgcctcaaggcagacattgcccgccgccagcggcgcgacgacgcgcaccaggccgaaacggtgcgcttccaccggctccagttccacctcgccgccatgaccgaggagctcgtccaccacgtcaccgacgcggacctctaccgcctcgtgcggcgctacgacccgggcgccgagttcgaggtcgacttctttggcggccggcccaagctcttcatcgaccagcgcggcccgcgcgaggagagctatcccggccagagctacgtcatcaggcgcggcaagggcggcagccggatggcggccgtggtggcgcaatacaagattgagagctatctcaagggcgacttctcggtcccgctcctcacggaggtccaggccgaggtattccccatggagcggtaccaggacgtcctgagacggttaggtggctcgaagcacgagacctggcagtggaaggaggggcagaccggcaccaggcgggttgccgaggttggttcatacgaccagcaggcgttcagcgtgccgtgggatatccaggggctggagtaccagctgatgaagaaggcttgcttcgacccatctatcagggtggtcgaccctcggggcctttag

SEQ ID NO: 3353 - protein, 394 aa, Myceliophthora thermophilia
MAPYMSVEHAHRTYGPVDREALHSHLSKSERGLLRMGLVKSEQWRRLPAEGLYQIVISEVLDNGKTYPLERNGARAFSVTSVLDLGLRMLESDRGRTALANLANKAICVWRERPVPGPVVEPWYIDIPATVDDFLRCVRYRFPIVKLDDRNGFCREEENETMPYSWVDEYSTLEHFDFNPKAAALMEKLYWTRLKADIARRQRRDDAHQAETVRFHRLQFHLAAMTEELVHHVTDADLYRLVRRYDPGAEFEVDFFGGRPKLFIDQRGPREESYPGQSYVIRRGKGGSRMAAVVAQYKIESYLKGDFSVPLLTEVQAEVFPMERYQDVLRRLGGSKHETWQWKEGQTGTRRVAEVGSYDQQAFSVPWDIQGLEYQLMKKACFDPSIRVVDPRGL

SEQ ID NO: 3354 - DNA, 1059 bp, Myceliophthora thermophilia
atggaatcgcagggctctgctccaactccccccatacttcgggcggttgccagttccacgaggcctctgtatcagctcctcaaggcgatcaactttaccaacaaggtgcacgtcgatgtcacagagcacggcctaaggttcgcggccgaccacgcccgggtcatgcaagggctgtctgtccgtgaattctcgaatgctgactttggctgccaaggggtcgcccactggagcaagagcctctttaccacctacaccacgaacctcccttcggcacccaacgccggcgaagacgccgaagcagacgatgatcccatgttcccaaccttccagatctcccttccggcgctcctcgaaactctccagatcttcggtgctgctgatgccgccgcccgccaggctaaggccgacgccgatccgtatcgtagcaacctgcgcaactaccgcccggacgccttctcgaaccacaccctcggcatgtcgggcacatgctcgctctcctacacgcgagagggcgagcccttcagcattgtgctcgacgaggccggcgtcagcactacgtgcaacctgaccacctacgtgcccgaggcgccggacgacatccccttcgacatcgaagacctgtccttcaagatcatcacgtctgcccgctggctgctggatgcgctcaccgagctggcgcccacgagccccgagaagctgaccatcgtcgcatccaggactgagccgtacctgcgactgaccagttcgggcggcccgctcgggtcgagcagcgtggatttcgccaagggccgggatctgctcgagaccttctccgtcaggggacggtgggcgcagacgttcaagttcaacatcatcaaatcggcgagcgaggccatgcggatcgcaagcaaggttagcatgcgcggggacggccaaggagtgttgagtatgcagttcatggtggaagtggaggggtccgggccgagcttcttggactttcggttcgtgccgtatgcggtctgtgaggacgacggggacgatgaccgagaaggggaggaggaaggcgatggtacaggttga

SEQ ID NO: 3355 - protein, 352 aa, Myceliophthora thermophilia
MESQGSAPTPPILRAVASSTRPLYQLLKAINFTNKVHVDVTEHGLRFAADHARVMQGLSVREFSNADFGCQGVAHWSKSLFTTYTTNLPSAPNAGEDAEADDDPMFPTFQISLPALLETLQIFGAADAAARQAKADADPYRSNLRNYRPDAFSNHTLGMSGTCSLSYTREGEPFSIVLDEAGVSTTCNLTTYVPEAPDDIPFDIEDLSFKIITSARWLLDALTELAPTSPEKLTIVASRTEPYLRLTSSGGPLGSSSVDFAKGRDLLETFSVRGRWAQTFKFNIIKSASEAMRIASKVSMRGDGQGVLSMQFMVEVEGSGPSFLDFRFVPYAVCEDDGDDDREGEEEGDGTG

SEQ ID NO: 3356 - DNA, 234 bp, Myceliophthora thermophilia
atgcgtctgtcgggactccagaaggaaatgcttgccctctacaggcaatgcattcgcgaatgccgcaaaaagcccgaggcaaaccgcaaacacttccaagcttttgccagaagagagtttgaaaagaacattaaaattgacaagcgtgactttgccgcggtcgaattccttcttcgaaagggcaggcgccagctcgagatatactcgtctccgggagtcaaagacatcaaatga

SEQ ID NO: 3357 - protein, 77 aa, Myceliophthora thermophilia
MRLSGLQKEMLALYRQCIRECRKKPEANRKHFQAFARREFEKNIKIDKRDFAAVEFLLRKGRRQLEIYSSPGVKDIK

SEQ ID NO: 3358 - DNA, 741 bp, Myceliophthora thermophilia
atgccttcattctctcgcctcgtccgcttcttggcccgggacggccgcacctactatggcgatgccatcttgccccgcggcgttactgatatcagcaaagcacgccaagcccacatcatcaagggcgacatctttggcaagcacgacgtcaccgaccaggtcgtggacatccggacgcttctggcccccctggcccccgaggacgtccggacggtgaggtgcctcgggcttaactatgcggcccacgcaaaggagtccaagatgcccatcccccaataccccgtcgtcttctataaacccgcgacctccctgaccgggccatcggatccgatccccgtccatcccatggcccagcagcacaccggcctcgactacgagtgcgagctggtggccgtcatcggcaagccctgctccgacgtgcccgagtcgcgcgcgctcgactacgtgctcggctacgcggtcggcaacgacgtgtcgcaccgcgactggcagctcaagctcggcggcgggcagtggtccctgggcaagggcttcgacggctgggcgccctggggccccggtatcgtgagccgctccgtcatccaggacccccaggcgctggccatccgcacgcgggtcaacggccagaccatgcaggagagcacgaccgcggacatgatctttggcgtggccaagaccatcgcgttcctgagccaggggacgacgctgatgccgggagatcttatctttaccgggacgtga

SEQ ID NO: 3359 - protein, 246 aa, Myceliophthora thermophilia
MPSFSRLVRFLARDGRTYYGDAILPRGVTDISKARQAHIIKGDIFGKHDVTDQVVDIRTLLAPLAPEDVRTVRCLGLNYAAHAKESKMPIPQYPVVFYKPATSLTGPSDPIPVHPMAQQHTGLDYECELVAVIGKPCSDVPESRALDYVLGYAVGNDVSHRDWQLKLGGGQWSLGKGFDGWAPWGPGIVSRSVIQDPQALAIRTRVNGQTMQESTTADMIFGVAKTIAFLSQGTTLMPGDLIFTGT

SEQ ID NO: 3360 - DNA, 870 bp, Myceliophthora thermophilia
atggctctggtgttgagcctcagagccgaagagatgacgaaacagggcagagatcgaatcaagaaccgaggttttgcaaaaactgggtatcgtggggtagccctggctagccctggtcagattcggcaaggcattctcctggggcgggaagccggcccggactcctggtccaatcaaccccggcattgcgggttgattggccgacgaggtccaacgtccttccagatcaagtcgtcccgctggattccgcgggatggtttggaatcagtgcaatcactcgaccaaacaaagatcctccagaagaacttggaccctggtcgggccgacagcttatctgtaagactcctccaagctttcggcgcgaatccggaggcgggtggacgacggggcaactcggtggtgaagcgagatcgagacccgccagcagggccgacacggcaagctctcggcggtatctcacacagtctttgtcctacggatacactagttgctcggtgcgtggggcccacgcaagccatgtttcggctgtggcttgcttccttccgggcggtcgagttattccaactcacgtggcatcgcgttactaacaacagattaccgccctccaacttccagcttgcacttatcctcttatctccctcctcactgccgctgcgcctgcccgacaaagtttccgagcaccgggcagctcgacctttgtatgataatgacaaacaagatcatcggacagacccgggccgtttcccaagtcgcaggcacaggactagtacggcgaaataccttttcgacctcgagcaatcacgttgcgagctcgtggcggacccatgcaagcgcgttgccttgcggcatcgacgccgttcaaacttgtaa

SEQ ID NO: 3361 - protein, 289 aa, Myceliophthora thermophilia
MALVLSLRAEEMTKQGRDRIKNRGFAKTGYRGVALASPGQIRQGILLGREAGPDSWSNQPRHCGLIGRRGPTSFQIKSSRWIPRDGLESVQSLDQTKILQKNLDPGRADSLSVRLLQAFGANPEAGGRRGNSVVKRDRDPPAGPTRQALGGISHSLCPTDTLVARCVGPTQAMFRLWLASFRAVELFQLTWHRVTNNRLPPSNFQLALILLSPSSLPLRLPDKVSEHRAARPLYDNDKQDHRTDPGRFPSRRHRTSTAKYLFDLEQSRCELVADPCKRVALRHRRRSNL

SEQ ID NO: 3362 - DNA, 261 bp, Myceliophthora thermophilia
atgcagctgttgcgcctggagagagagtctcccaacggccaatctcggccacgtggagttgggggtcgcaaggctacactagcgtggctcgaatgggaaatggtggcggacgaggccgtcagacagctagctctgccgatcagcttcaaacaggagcgtggcgatggcggtattccgtattccttgtccaaaaacggcgcccccgacgggattcgcctttcaggaagccagccgtgccagctaaaccagaaacacggctag

SEQ ID NO: 3363 - protein, 86 aa, Myceliophthora thermophilia
MQLLRLERESPNGQSRPRGVGGRKATLAWLEWEMVADEAVRQLALPISFKQERGDGGIPYSLSKNGAPDGIRLSGSQPCQLNQKHG

SEQ ID NO: 3364 - DNA, 2340 bp, Myceliophthora thermophilia
atggcccggccgtatagcagcgagagcagcttcacctaccctgcgaggcactacccggaccgctcgacctcggcatccgagaccctcatctacttggttgcccaagccgtccgcgcgctggtccggttctggcgcgagcgcggccgccgcctggcctacgccgccctgcgatccatggcccaccgtctgcgcctgaacttgacctataaccgcctgctcagctttccgcacctgctcgtggccgcctgggtggtcctgctgttatggggtgagagatgggtgttccactccaaggttgagagctgccactggaggaactgggagaactggcctgccggcgcagagccgcatcgcgttgccctcgtcgccgatccccagctcatcgacccgcactcgtacccgggccgcccgtggccgctcaaccccttgacgatgctgatcacggacaactacatgcgccgatcctacaatcagctgcagtcgcagctcgaccccgatagcatcttcttcctcggcgacctgtttgacggcggcagggagtggaagacggcacacggggagttcaaggacccggaatggggcccccacccgaagagcgagcagaaatacctgaagaagtggcacaagacgtacggggagttttactggctacaggagtacgccagatttgtggacatcttcctcaacccgtggttgaaggccggagccgcgcagggtgaccggccgaggaggaggaggaagctgatcgccagcctgccgggcaaccacgacttggggttcggtgacaagatcaaagtgtccgtcaggaaccgattcgagacatactttggcgaaggcaaccgcgtggacgtgattggcaaccacacgttcgtctcggtcgataccgtctcgctgagcgccgcctcgtcggttgaggccaagcggcacgacctgagggagatctatgagccggtcgagcggtttctggacgggttgcaaaaagaaaaacaaaaggcagtcgacagggaactgcgcctcctccggggagaggtgcccaaaggccagctcaagcacgagatcgagggcctcgacaaggccaaatcccccggcaaatccaccacctccgccacccccaaggtcgccacgccggagcttcccaccatcctgctcacccacgttcccctctaccgaccacccggtaccccatgcgggccgctgcgggagaggtggccgccgacgaagccgcccaagggccagaccgacccggtcgttccagaccaccgcaacgccatctccgtctcggcaggctaccagtaccagaacgtgctgaacgagaaggactcagaggatctcgtccgcagagtcggaaacgttgtccatgccttctcgggcgacgaccacgactactgcgccgtcacccactcggccgcccaggccaacgtgcccgagatcaccgtcaagagcatcagcatggccatgggcgtctccaagccgggcttcctgctcgtcagcctgtacaacccgatcgacccggccaccggcgagcccctggccccggcctcgccgcctcagtctgacggggaaggggaaggggcagcagcaggagggaaaacggccacgctgcagacccacctgtgcctcctgcccagccagatatccacctacctccactacgtcacttttgccgtcatctgcatcgccgccctcgccgtgcgcgccgtgctcgtgcccgtgctgggtctgacgccctttgcgctcgacgaatcctcgctctcttcaccatcaccatcaccatcatcatcattctcatcatcatcatcggcgagacggagaaagagcgcgctgctgcctgtgtacaaggccaaggtggaggactacgacgagtacgcgctgccgcgcggcttctcggcgtcccacttcctaaacggggccaacggcggcggcggcggcggcggcggtgggaacggaaacaacgtggcccggggccggtcggggagcgggtcggcgtcagtcctacccggcggacgtggtcccagccccaacaagaagagccacggccacggccacggccacggacatggtcagggccacgggaaggggtcggcggcgcggaagtgggggtgggccggtgcggggagggcccgggcggcgccgaggatcgagatccccagcgagggcgaggaggaggaggagtactacggggcctatggcgggggcaagtggaaggcgaggctgaagaagggagggcggtggcagcccaggtcggtcgtccccgccgtggtgagggagttctggacgacggcctggagggtcctctggatggctgccggcttctttggttggttggcttggaaagggtga

SEQ ID NO: 3365 - protein, 779 aa, Myceliophthora thermophilia
MARPYSSESSFTYPARHYPDRSTSASETLIYLVAQAVRALVRFWRERGRRLAYAALRSMAHRLRLNLTYNRLLSFPHLLVAAWVVLLLWGERWVFHSKVESCHWRNWENWPAGAEPHRVALVADPQLIDPHSYPGRPWPLNPLTMLITDNYMRRSYNQLQSQLDPDSIFFLGDLFDGGREWKTAHGEFKDPEWGPHPKSEQKYLKKWHKTYGEFYWLQEYARFVDIFLNPWLKAGAAQGDRPRRRRKLIASLPGNHDLGFGDKIKVSVRNRFETYFGEGNRVDVIGNHTFVSVDTVSLSAASSVEAKRHDLREIYEPVERFLDGLQKEKQKAVDRELRLLRGEVPKGQLKHEIEGLDKAKSPGKSTTSATPKVATPELPTILLTHVPLYRPPGTPCGPLRERWPPTKPPKGQTDPVVPDHRNAISVSAGYQYQNVLNEKDSEDLVRRVGNVVHAFSGDDHDYCAVTHSAAQANVPEITVKSISMAMGVSKPGFLLVSLYNPIDPATGEPLAPASPPQSDGEGEGAAAGGKTATLQTHLCLLPSQISTYLHYVTFAVICIAALAVRAVLVPVLGLTPFALDESSLSSPSPSPSSSFSSSSSARRRKSALLPVYKAKVEDYDEYALPRGFSASHFLNGANGGGGGGGGGNGNNVARGRSGSGSASVLPGGRGPSPNKKSHGHGHGHGHGQGHGKGSAARKWGWAGAGRARAAPRIEIPSEGEEEEEYYGAYGGGKWKARLKKGGRWQPRSVVPAVVREFWTTAWRVLWMAAGFFGWLAWKG

SEQ ID NO: 3366 - DNA, 1575 bp, Myceliophthora thermophilia
atggccccatttgccgcaacgagcggcccggggcagggccccggacaaaaccacgacataatacccggtcccgaccgtgccgaccatcacgaccatcacgactataccgactacgccgaccctccgagcgaccctgccgagatcacggcgctaacctctcctcctttagcaacccccctcgacgtcgtccgcgtccggtggcagtcccaaagcctctctcaaccgcccgccatcgacttcaccaagctcgccttccctaccaccctcagccgcggcggcaccactgccttccgccccgccgacctgggcgtgaccgcctgctgccgcgaagtcttcttcaccaccaacacctccgaggtctgcgtcctcggcccccgcctgccctcctcgtccctcgccggcttgcaggcgccggcgccggcgcccgtgacctgcgccgtcgaggagacccagcagcggaccttcacctcgaccttcgacggcctccgcaagatcgcccgcaacgagggcatcacgacgctctggcgcggcctctcgcccaccctcgtaatggccatccccgccaacatcatctacttcaccggctacgagtggctgcgcttcaaccgccgcagcagccccatcgcccgcgccgtgcccgacgactacgccccgctcgccgccggctccttcgcccgcatcctggccgccaccgccgtctcccccatcgagctgttccgcacccgcctccaggcggcccagggcaccaccaccaccaccgccggcggcagacggggcggccacctggcgagcaccttccgcggcatcaaggacatggtcgccgtccacggctatcgctccctgtggcgcggcctgaccctcacgctgtggcgggacgtgcccttctccggcatgtactggtgggggtacgagacgatccgggggcgcctgagcgacgcgcgggagagcgccgccgccgcgcggagccacggcgggctggacctggacctggacctggaccgggatctcaatccggacgggcaccgcggtcgcggggagcggcggctcgacgatcgtccgggccccgaagcggacgagccgagggcgagggcgagggcgaggaggcgctcgcgcagccgcgccaacgagaaccacgccgacaccttcaccgacagcttcatcgccggcgccgcgtccggcgccttcgccagcatcgtcaccatgcccttcgacgtgggcaagacgaggacgcaggtcttccgggacaccaatgtttcttcttcttcttcctcttcttcttctgcgtcgtcagatgctgcagcagcaggcagcggcggcgcggcaaagggcgtggtgggcggtccgaaggccgcggccaccctggcccccgaggaacgcaacatggtccggctgctgtggcacatcttccgcaccgagggcctcccgggcctgttccgcggctgcgtcccgcgcaccctgagggtcgcgccggcctgcgccatcatgatcagcagctacgaggtcggcaagagggtgttcaggggtgtaaacgaacgggcgcttgcggagcggaaaggggatctcggcggctcatga

SEQ ID NO: 3367 - protein, 524 aa, Myceliophthora thermophilia
MAPFAATSGPGQGPGQNHDIIPGPDRADHHDHHDYTDYADPPSDPAEITALTSPPLATPLDVVRVRWQSQSLSQPPAIDFTKLAFPTTLSRGGTTAFRPADLGVTACCREVFFTTNTSEVCVLGPRLPSSSLAGLQAPAPAPVTCAVEETQQRTFTSTFDGLRKIARNEGITTLWRGLSPTLVMAIPANIIYFTGYEWLRFNRRSSPIARAVPDDYAPLAAGSFARILAATAVSPIELFRTRLQAAQGTTTTTAGGRRGGHLASTFRGIKDMVAVHGYRSLWRGLTLTLWRDVPFSGMYWWGYETIRGRLSDARESAAAARSHGGLDLDLDLDRDLNPDGHRGRGERRLDDRPGPEADEPRARARARRRSRSRANENHADTFTDSFIAGAASGAFASIVTMPFDVGKTRTQVFRDTNVSSSSSSSSSASSDAAAAGSGGAAKGVVGGPKAAATLAPEERNMVRLLWHIFRTEGLPGLFRGCVPRTLRVAPACAIMISSYEVGKRVFRGVNERALAERKGDLGGS

SEQ ID NO: 3368 - DNA, 858 bp, Myceliophthora thermophilia
atgacgactccagaccccttcgactccgcacttgacctcctccgccgcctcaaccccaagcacacggccgagcatctcaacaacataatcaccctcgcgcccgacctgaccgaggacctgctctcgtccgtcgaccagcctctcacggtctgccgatgcaagcagacggggcgcgactacctgctgtgcgattacaaccgcgacggcgacagctaccgctccccctggagcaaccagttcgacccgccgctggacgaggccggcccgggcggcgtggggccgggcggcagcaacgagggcgccggcgagggcgccgtccccggcgagcgcgtccgcaagatggagatcaaggccaacgaggcctttgacgtctaccgggagctgtactacgagggcggcgtgagctcggtctacctgtggaacttggacgacggctttgcgggggttgtgttgctcaagaaggcctcgaccccaagcgacggtgcctcgtcaggcgtctgggactcgatccatgtcttcgaggccagcgagcgcggacgcacggccaactaccgcctgacatcgaccgtgatcctatcgctcgccaccaagggcgccaccctgggcgaggtcgacctgagcggcaacatgacgcgccaggtcgagcaggacctgccggtcgagaacgacgagagccacatcgccaacatcggccgcctcgtcgaggacatggagctcaagatgcgcaacctgctccaggaggtctacttcggcaaggccaaggacgtcgtgggcgacctgcgcagcatcgggagcctgagcgaaaaccagcgggatcgcgagacccagcgggagctgattgggagtatgcggagatga

SEQ ID NO: 3369 - protein, 285 aa, Myceliophthora thermophilia
MTTPDPFDSALDLLRRLNPKHTAEHLNNIITLAPDLTEDLLSSVDQPLTVCRCKQTGRDYLLCDYNRDGDSYRSPWSNQFDPPLDEAGPGGVGPGGSNEGAGEGAVPGERVRKMEIKANEAFDVYRELYYEGGVSSVYLWNLDDGFAGVVLLKKASTPSDGASSGVWDSIHVFEASERGRTANYRLTSTVILSLATKGATLGEVDLSGNMTRQVEQDLPVENDESHIANIGRLVEDMELKMRNLLQEVYFGKAKDVVGDLRSIGSLSENQRDRETQRELIGSMRR

SEQ ID NO: 3370 - DNA, 1950 bp, Myceliophthora thermophilia
atggctcacgccaatcggaaagctttcgccaaccatccgggggccaaagaagcaccggcttctgctctggaataccgtctggagaaggacacgaaccctcctctgcgcggccgaggtcttgtcatcgcttcgttcgtggttgaacgtttcgctttcatccagaggctgctctggaaaaacgccaagttcggccaaatcaaattcacccccgacctgaacggcgtcgcgtggcggatccagcccgatgtcattccgctctccagcagcaccaccccgcgcggcttgctcgaggtcccgccggagctggtccagccccagcccgcgggcctcgccggccgcttctcctcgatcgcggattatcacgagctctacaagtctggagcggcgacgccgacccaagtggtcgaggctctgctgccgctgatcgaccgcgaccgcgagccggagccaaaggaatacgccatcgctttcacgcagatgcgtgcccgggatgtcctggaggcggccgcagcgtcgaccgagcgctgggctcaagggaagccgctctcttacttggacggcgtgcctttcggcgtcaaggacgatgtggatgtcgaaggctacgtgtccttgatgggtatgaaggtgaatgacgcccacaagtacttcaacacgttgccagaacgttcagcttggcctgtcaggaagttgaaggaggccggggccatcatgatgggcaagctaaaccagcacgagatcggcatggatacgactggctgcaacccaacaacgggaaccccccggaactggtacaacaagtcgtactacccaggcggatcgtcatcgggttgcgcgtctgctgtctctgctgggctcgtgcctatcgctgttggatcagatgcaggaggcagtatccgtatcccatctgcgttctgcggcgtctatggcctcaagcccacgcacaaccgggtctgtcacatgagctcgtctgtgtgcgccctcggccccatagcatcgacggctgcggacctgaccatcgcctaccgcttcatggcacagccgaatccagaggacccggtccagagcttgttcgccgtgtccacgcctccggaaccctcggccaagaaatacctcggcatctgccgagagtggattggcggcacggtcgaccaggacgtgctccggatcttagaccagtcgctggaccacctcgtcgcgctcggctacgaagtcatcgacatccggctgcccttcctccgcgagggccagctagcccactcggccatctgcgtcaccgaggcggcggctgacgcgcgcaaccgcgccgagacgccctcgtcgttcctcgacatgctcaactatcccaatcgcgtcgtcatcggcacgggctcccagaccccggccattgacttcctcaagtacggacagatccgccaagtcatcatgcagcacttggccttcttgtgggaaaagtaccctggcatgatgatcctgagcccggcgacgcccatggccggctggcccattaccgaaggcgacgacaagtacggctgcttcgacgggaacatgtcgatccgcaacatgacgtacgcctggctcgccaacttgagcggctgccccgccgtgtcgttcccggccgggtacgtcgagcccaagcaaggtgagggcatgctgcctgtcgggctcatggcgatgggggagtggggcgctgaggagcagctgctggccttcgcgagggagcgggagagctacctgaacgacgtgtatcccggaggcaggcgaaggcccgagcagtgggcggaccccattggtgaggccaggaagtgggctgacctggctcgagcttcgaggcagaacgtcgccgaggcccaagaggcgagggctgcagcgctagcggctgggaagaacgtggacaaggatgggaatatcgagggagaggaagaccagcagaaggaggaaggggagcactga

SEQ ID NO: 3371 - protein, 649 aa, Myceliophthora thermophilia
MAHANRKAFANHPGAKEAPASALEYRLEKDTNPPLRGRGLVIASFVVERFAFIQRLLWKNAKFGQIKFTPDLNGVAWRIQPDVIPLSSSTTPRGLLEVPPELVQPQPAGLAGRFSSIADYHELYKSGAATPTQVVEALLPLIDRDREPEPKEYAIAFTQMRARDVLEAAAASTERWAQGKPLSYLDGVPFGVKDDVDVEGYVSLMGMKVNDAHKYFNTLPERSAWPVRKLKEAGAIMMGKLNQHEIGMDTTGCNPTTGTPRNWYNKSYYPGGSSSGCASAVSAGLVPIAVGSDAGGSIRIPSAFCGVYGLKPTHNRVCHMSSSVCALGPIASTAADLTIAYRFMAQPNPEDPVQSLFAVSTPPEPSAKKYLGICREWIGGTVDQDVLRILDQSLDHLVALGYEVIDIRLPFLREGQLAHSAICVTEAAADARNRAETPSSFLDMLNYPNRVVIGTGSQTPAIDFLKYGQIRQVIMQHLAFLWEKYPGMMILSPATPMAGWPITEGDDKYGCFDGNMSIRNMTYAWLANLSGCPAVSFPAGYVEPKQGEGMLPVGLMAMGEWGAEEQLLAFARERESYLNDVYPGGRRRPEQWADPIGEARKWADLARASRQNVAEAQEARAAALAAGKNVDKDGNIEGEEDQQKEEGEH

SEQ ID NO: 3372 - DNA, 2124 bp, Myceliophthora thermophilia
atggggaaccatgacaaggaaatcctcgaggcttcggccaagcaccccatcgtgcccctcgagaagggcaaattctacacctacggcaccgccggcttccgcttgaaggcagaccttctcgagggcatctcgtaccgcgtcggtctccttgcgtcgcttcggagccggaagctcaacgggcaggccatcggcgtaatgatcaccgccagccacaacccggccgccgacaacggcgtcaagatcgtcgaccccctaggcgatatgcttgagcaggattgggagcgctacgccacggccctggtcaacgccccaagcgacgaacagctcgtccaggtttacaacaggctggccacggatctcaagatcgatctgaagagtcctgccaaggtcatctacggccgcgacactagaccttcgggccacaagctggtcacggccctcgctgacggtctcgaagccaccaaggccgagtccgtcgaccacaagatcctcaccaccccccaactgcactacctcgtgcgggcaaccaacagcgagggcacgcctttatcgtacgggaaggtcagcgaggtcggatattatgagaaactagccgaggctttcgtccgcgccctgaagggcaggaagatcaacgggacgctacaggtggactgcgccaacggtgttggcgggcctaagctgaccgagctcctcaaatatattcccaaagacaaggttaattttgacgtcaaggtcgtcaacgacgatgtcctccgtcccgaggttctcaactttgaatgcggtgccgatttcgtcaagacgaagcaaagagctccgcccacccccaagccccagcccggcctcaggtcctgctccctggatggtgacgccgacaggttgatctattactgggtagaccccgagagcggcttcgtcatgctggacggcgaccgcatctcctcccttgccgcctccttcattggcgaccttgtcgagagtgccggcctgaaggacgacctgcgcatcggcgtcgtgcagaccgcctacgccaacggcgccagcaccaactacatcacccagcatctgaggttacccgtgatctgcactccgactggcgtgaagcatctccaccatgtggctcagggatttgacattggggtctacttcgaagccaatggccacggcaccgtcctcttctccccagacgccctcaacgccttcaagaagaaggagccgcaatcgcccgcccagaaagacgcactcgacacgctggctgctctgggagatctcatcaaccagacggttggcgacgccatctcggacatgctcttggtcgaggtgatcctcgcgcacaagaactggtcgctccgtgactgggccatgacctacattgacctccccaaccgcctggtgcgggtcgaggtgggcaataaggatctgtttcagacgaccgatgccgagcgacgtctgctgcatccggagggcgcccaggacgagatagaccaggcagtcaagaagtacaaggacgcgcgcgcctttgcccgagccagcggcaccgagaacgcttgccgcgtctatgccgaggcggccacccgttccgaggccaacgagcttgccgagcgcggtcgggaccgagccgtttcgtcttcggacctggagccttccaccctctcggctctccatctcgacaccaacggcagtgataaggagagaaacaacatcgtggacggccctgaccgcaaccgcaaccgcaaccgcagcgtctcgttgttctccgagctgcagccccagtcacagtacgcgcactcgcggcttgattcattcggcaggtatagcacgacggaaacctttgtgttcgagatggaggaggatatccaggagaggaagaggttgcgtattccagttccgaagtatgatgctttcagcagcggggagccgtcacctgatcctagtctggtgccgtcgaagtcgtatctggagacctggcgttcacgaccaaaaatggaagcgctagaactgaaggagacggaggagaatgggaatggggagggggagagcagcgaagaaaagcagaatatcgcggttaagaaaattatggatgatgcattgggcaatgttaccgaagatgtccaggggggccaataa

SEQ ID NO: 3373 - protein, 707 aa, Myceliophthora thermophilia
MGNHDKEILEASAKHPIVPLEKGKFYTYGTAGFRLKADLLEGISYRVGLLASLRSRKLNGQAIGVMITASHNPAADNGVKIVDPLGDMLEQDWERYATALVNAPSDEQLVQVYNRLATDLKIDLKSPAKVIYGRDTRPSGHKLVTALADGLEATKAESVDHKILTTPQLHYLVRATNSEGTPLSYGKVSEVGYYEKLAEAFVRALKGRKINGTLQVDCANGVGGPKLTELLKYIPKDKVNFDVKVVNDDVLRPEVLNFECGADFVKTKQRAPPTPKPQPGLRSCSLDGDADRLIYYWVDPESGFVMLDGDRISSLAASFIGDLVESAGLKDDLRIGVVQTAYANGASTNYITQHLRLPVICTPTGVKHLHHVAQGFDIGVYFEANGHGTVLFSPDALNAFKKKEPQSPAQKDALDTLAALGDLINQTVGDAISDMLLVEVILAHKNWSLRDWAMTYIDLPNRLVRVEVGNKDLFQTTDAERRLLHPEGAQDEIDQAVKKYKDARAFARASGTENACRVYAEAATRSEANELAERGRDRAVSSSDLEPSTLSALHLDTNGSDKERNNIVDGPDRNRNRNRSVSLFSELQPQSQYAHSRLDSFGRYSTTETFVFEMEEDIQERKRLRIPVPKYDAFSSGEPSPDPSLVPSKSYLETWRSRPKMEALELKETEENGNGEGESSEEKQNIAVKKIMDDALGNVTEDVQGGQ

SEQ ID NO: 3374 - DNA, 1020 bp, Myceliophthora thermophilia
atgtccaacctgttttctggaatcaatgcccggttgaggggagccacgggcaagggcagcacgaagagccctgtatcaccttcctcggacgatggccacctcaacccgcccaggggcctctcacagaggagcaagtcatcaagcaacttgtcagctaaggcatctcaaatgccagcgtcgccttcgctgcctctgacccctggcccaggggccacgggcgacgaggtgttgaggtcctatcgcctcccacagcccttgcccatgtggctcaacccggtctatgcgaagcatatcgtcaagggtaacttcatgactctcagcagcagacccaagacggtcgagcagggcgaatggatggcacaccaagttgttgagcattatcgcaacctttggaattttgtccatgttgtatatgctaaggaggccaacgggaagagtatctgcaatgctactacgtgcccccggatgtctgccggaccaaaccactcgtacacgtggcttaacaagacgggtgaccgttatgaacgcgtcgagctgccagctatcgattacatagtgctgatgcagcggtggatctcgagcaaagtggatgacaccaacatcttcccgaccgaccccgccagcgtctctttctcccacaatcccaatatcgccaatagtgctcttctcaacaatccggacgagtggataggcaagcgcagcgggttccccaaggagttcgccggcatctgcaagaccatcttcctacagatgtttcgagtctacgcccatctttactgggctcacttcgtggagcccttctatcatctcaacctggaaaagcagctcaacagctgcttcagtcacttcatcttgactgccacgacgctggacttgctcaagcctcaggagcttgagccaatgcaggccttagtcgacctgtgggccgctaatggcacgtttccaccggagtctaaggcctacgagtatgccaacctaaaagtgggcacacggttattgcagatggcaggcatggcttga

SEQ ID NO: 3375 - protein, 339 aa, Myceliophthora thermophilia
MSNLFSGINARLRGATGKGSTKSPVSPSSDDGHLNPPRGLSQRSKSSSNLSAKASQMPASPSLPLTPGPGATGDEVLRSYRLPQPLPMWLNPVYAKHIVKGNFMTLSSRPKTVEQGEWMAHQVVEHYRNLWNFVHVVYAKEANGKSICNATTCPRMSAGPNHSYTWLNKTGDRYERVELPAIDYIVLMQRWISSKVDDTNIFPTDPASVSFSHNPNIANSALLNNPDEWIGKRSGFPKEFAGICKTIFLQMFRVYAHLYWAHFVEPFYHLNLEKQLNSCFSHFILTATTLDLLKPQELEPMQALVDLWAANGTFPPESKAYEYANLKVGTRLLQMAGMA

SEQ ID NO: 3376 - DNA, 1317 bp, Myceliophthora thermophilia
atggcgtcggaacacgagtcagagcagcatccacaacagtcggtgcaacgagcacacccgccagagccctcccccaacggcggcggcagcggcagcggcagcgccgcccgcgatggtgacgaggaacctgcaaagcagacaccgccggagcagacaccgccggaagatggcatagcacaacctgtcgccagcacgtcccacgagcgcggatgcggacccgatcccgatcccgaccccgaatccaaccgggcaccgctgttcccggaagacggcgacggcggcaatgacgccgcttccgatgtctcgatcccctccgacgacgccgcctcgcacgaagtggtctcgccgagcgcctccatccccccgtactggacgaacccacgccttctcgaacgacagcagcagaagcagcagcagcaaaacgggcagcaaccccgcccacacaccgccaccgcatcatcatcatcatcatcatcctcctccggccgcctcctcgggcagcacggccacgcgcgcaccgtctcgagcgcctccgccgagtcggtcctccccccgggcgccatcacgttgcaggacaacgagcgagaagaagaggggggaggagaaggggtcaacggcagcggcggcgcggtgggaaacgggcgcgcgtcggtggggccggcgggggcggtggcaggaggaggtcggcgcagcaacggcggcgaccggcacgggcgcgagcgcaaccgggcttgctgggcgcgcagcgtgcaggtgaccgactacgtgctcgtcaacgggagcacgaccaacatcggagcgttcgtggtgtggattatcaaggtggagaccttaaactttactaggtcatggtcaatggagaagggaagtgcgcatgaggggagggggaagaggaaggggaagaggaagaagaagaggggtgtgtgtgtgtgtgtgtgcggctcccgcatgaacatccgcaagcgctactccgagttcgacgacctccgtcggcggctggtccagaccttccccggcttcgaggcggccgtgccggccctgccgcccaagagcgtgctcaagcgcttccacccgcgcttcctcgagaagaggcgggccgggctgcagtacttcttgaagttcgtccacccctccttcccggacgcccctcccctgtccctctctcccccaaaccctctcattccaggaaaacgtctgcatcctgttgaacccagaattctcgggctcgccggtcctaaaggatttcctcttctcatgaccatgcggcgcatggccctcgcgccgcatgcctcgcctttcctatactcgctcttgtaa

SEQ ID NO: 3377 - protein, 438 aa, Myceliophthora thermophilia
MASEHESEQHPQQSVQRAHPPEPSPNGGGSGSGSAARDGDEEPAKQTPPEQTPPEDGIAQPVASTSHERGCGPDPDPDPESNRAPLFPEDGDGGNDAASDVSIPSDDAASHEVVSPSASIPPYWTNPRLLERQQQKQQQQNGQQPRPHTATASSSSSSSSSGRLLGQHGHARTVSSASAESVLPPGAITLQDNEREEEGGGEGVNGSGGAVGNGRASVGPAGAVAGGGRRSNGGDRHGRERNRACWARSVQVTDYVLVNGSTTNIGAFVVWIIKVETLNFTRSWSMEKGSAHEGRGKRKGKRKKKRGVCVCVCGSRMNIRKRYSEFDDLRRRLVQTFPGFEAAVPALPPKSVLKRFHPRFLEKRRAGLQYFLKFVHPSFPDAPPLSLSPPNPLIPGKRLHPVEPRILGLAGPKGFPLLMTMRRMALAPHASPFLYSLL

SEQ ID NO: 3378 - DNA, 522 bp, Myceliophthora thermophilia
atgcacaagaaacaaaacacaaaggcccgaaagactggtcgggaaaacgacaccaggccgccagcccgagactggccaggccatttccagggtgaagtggtggtagggcagcgattccgaatcagcgaaggtccagcgaagggagatcgactggccgccggatggccgcggaccctgccgagaaactcggggtcactttggggctcttggttggtgacaggtcgatgcgaagcgccgatagccgtttggatggaccaggcgaccctgaaagcaggcttgagtgctttccttgtgcctggcaggttcgcaggtggcaggtctgcacagcccactttacttgccgccgaggagcctctccaagcgcccgccttcttctccgtcggcaatgaacactcggcggttcgacggttcgatgagagtaccgtcctcgtcatcttgagtaccaaggcggcctcaaacccgggacgaggatgcgttttcgccctaaccgtacaagtaacagcgtctcatatgatcgcctga

SEQ ID NO: 3379 - protein, 173 aa, Myceliophthora thermophilia
MHKKQNTKARKTGRENDTRPPARDWPGHFQGEVVVGQRFRISEGPAKGDRLAAGWPRTLPRNSGSLWGSWLVTGRCEAPIAVWMDQATLKAGLSAFLVPGRFAGGRSAQPTLLAAEEPLQAPAFFSVGNEHSAVRRFDESTVLVILSTKAASNPGRGCVFALTVQVTASHMIA

SEQ ID NO: 3380 - DNA, 657 bp, Myceliophthora thermophilia
atgccgtcgcgagacgagaaaaaaagcggcgacgaggaggccagcaacaacaccacccacccgctctcctccgacctcctgcacccttccgataccacctcaccacccacagacgatgctgcgcccgaggttaaggataccgctgcggccgcgagtcggcacgccggcgactacaacctgaagaacgaggcctcgcagaatggcatcgccgacttcctctcccccgccgcattcaacatcgcgtggacccagtaccagacacacctcctggagaagttgaacgccttgacagcaggcatgtcttcatgtctctttctctctcagagcgactatgagtcccgacacgtcaaggacatcatgctcagcaccgcccgcgatcccgcctccgctcccctgttcaactacgccagcatgatccacaacaaccacttcttcttcaagcacctcacccccaagccggtcgagatgcccgacgccctgcgcgtccacctcgagaggtccttcggctccatcgagacgctccgccgggagatggtctacaccgccgcctccatgttcggcccgggcttcgtgtggctggtcaagacgtcctcgccacctacgccgcgggttccccctacccggccgcccactggcgccgccaggaggtcgacatga

SEQ ID NO: 3381 - protein, 218 aa, Myceliophthora thermophilia
MPSRDEKKSGDEEASNNTTHPLSSDLLHPSDTTSPPTDDAAPEVKDTAAAASRHAGDYNLKNEASQNGIADFLSPAAFNIAWTQYQTHLLEKLNALTAGMSSCLFLSQSDYESRHVKDIMLSTARDPASAPLFNYASMIHNNHFFFKHLTPKPVEMPDALRVHLERSFGSIETLRREMVYTAASMFGPGFVWLVKTSSPPTPRVPPTRPPTGAARRST

SEQ ID NO: 3382 - DNA, 1191 bp, Myceliophthora thermophilia
atggaggacacacgaatcccggtctggctggactgtgacccgggtcacgacgacactttcgccatcctcctggccgcctaccacccggcaatccgcgtcctcggcgtctcaaccgtcttcggcaatgcttcactcgaaaaaacaacgcgcaatgccacctccatcctcactgccataggcaaggcatccagcatccctgtctacgtcggcgcctcgcacgcgctgtatcgcccgccgatgcacgcgcccaccgacatccacggcgagtcggggttagacgggaccgatttgcttccgccgccagccgtggaggcgcgcaccaacccgccggccatcgatgccgcctatgccgccctgaaggccacgccgcccggcaccgcctgggtcgtcgccacgggcgccttcaccaacgctgccgccctcttcctcaagtacccggacctggtcggccacatccgtgggctctcgctcatgggcggcgccctcggcggcggcttcacccctgccgtcctcggcgaggtcgccggcgtgccccgcgtcggcaactggacccagttcgccgagttcaacgtcctcgccgacccggaggccgcagccgccatctttgccaaccgcgagctcgcccgtaagaccaccctgatccctctcgacgtgacccacctggtcctgaccacggagagcgtgcgcgacctgctgctctacggccgcgaggaggtggagaggggcacagacggagaggctcggaggaacggcaagccaggaaagacgaagcttagggttatgctggtggagctgctgatgttctttgcaaagacctacaaagacgtcttcggtatcaccgagggcccgccgctgcacgacccgctcgctgtggccgcggtcctgacgggcgtcggggaccagcacgagatccccttcgctgactgtgatcctgcgggggagccgggactggcgcagcgggagcgttacgaggtgtcggttgtgaccgagggcacctacgaagacgcccgcgccggagccaggacgggccagatcacggccaagctgctccccccgggcgaagagggcgtcaggataccgcgcagcctggatatcccgctattttggaaggtcctggaagagtgcgtccagagggcagacgatgccattgccgctgccgaggccgctgctgccgggacagcgtcaaattga

SEQ ID NO: 3383 - protein, 396 aa, Myceliophthora thermophilia
MEDTRIPVWLDCDPGHDDTFAILLAAYHPAIRVLGVSTVFGNASLEKTTRNATSILTAIGKASSIPVYVGASHALYRPPMHAPTDIHGESGLDGTDLLPPPAVEARTNPPAIDAAYAALKATPPGTAWVVATGAFTNAAALFLKYPDLVGHIRGLSLMGGALGGGFTPAVLGEVAGVPRVGNWTQFAEFNVLADPEAAAAIFANRELARKTTLIPLDVTHLVLTTESVRDLLLYGREEVERGTDGEARRNGKPGKTKLRVMLVELLMFFAKTYKDVFGITEGPPLHDPLAVAAVLTGVGDQHEIPFADCDPAGEPGLAQRERYEVSVVTEGTYEDARAGARTGQITAKLLPPGEEGVRIPRSLDIPLFWKVLEECVQRADDAIAAAEAAAAGTASN

SEQ ID NO: 3384 - DNA, 750 bp, Myceliophthora thermophilia
atgcttctaccgggcactgaacgcggcctagaagtctccacacctgcagaggatgatggcacctcccatgacgaaaaccgcatctcggcctctgcgtggatggcagcgaccaactcagagtcggcctcgggagtagacgatggcggcgagcccaagttggccagtttcgcagtctcatcagccagtgcgccggttctgatgctcttgctcggcgcaggctctgaactcgaagctgcggcggcccactgcaacaccgtcccattcgcggaaagcgccgcaacgcacaagcgccggaagcttatcgatgtcacttcttcaaaagcagaacatttgtcttatcatcgcaccccttcgaccgcggcattcgcctcgatttcaggcgctgactcgacgagggagggatggtgcatcgaacgaggccttagtgtcccgctcggcgcgatcaagccagcagcagtctgccgtgcaccgattcgtgtgacagggatatgggggtactctcagaacgttgagctgtccacgtggtgccctctcttcttgtctgtaccagcccgcgatggtattgaccgccggacaaaagagagctccattcaaccgcaaagcgaaacgctgtctgccgtacaaaaggaaaataggcttaccggggttgatgtgttttatggagttctgttgcagctcagcgtgatgagagaggaagcaggggcgatcgctcgcccgttcatgccttttttgccttgcattattccgtaa

SEQ ID NO: 3385 - protein, 249 aa, Myceliophthora thermophilia
MLLPGTERGLEVSTPAEDDGTSHDENRISASAWMAATNSESASGVDDGGEPKLASFAVSSASAPVLMLLLGAGSELEAAAAHCNTVPFAESAATHKRRKLIDVTSSKAEHLSYHRTPSTAAFASISGADSTREGWCIERGLSVPLGAIKPAAVCRAPIRVTGIWGYSQNVELSTWCPLFLSVPARDGIDRRTKESSIQPQSETLSAVQKENRLTGVDVFYGVLLQLSVMREEAGAIARPFMPFLPCIIP

SEQ ID NO: 3386 - DNA, 1056 bp, Myceliophthora thermophilia
atggaccgcgccctcgatcgtagtcttgacgagatccttgaggagcgcaagcagaacaacagaagttctcgcggcggccgtcgccgcgacagatccgattaccccagagatggcgtcagaaagtccttcagagatgacgcaccgcggaaccttgattccgaatgggtccacgacaagtttgaagattacgggagccgccgctctgctcccagacgcagatattctcccgagccgaccagcgaaaccaggggcaccaagctcagggtagacaaccttcactacgaactgacccaagaagacctcgaggacctcttttcccgcatcggccccctcatcagcctcgagatgaagtacgaccgcgccggccgctctgagggtaccgccttcgtgacgtacgagtcccgccgcgacgccctgcaggccatccgggagtacgacggcgccaacgccgccggccagcccatcaggctgaccctgctgcccggcgggccgtcggccggcgcctcgagggggggaggccggtccggcggcaaccatccgttcgactcgtccgccaacgccggccgcccgctcgccgagcgcattacggtgcccgggcagggcaggtcccgctcgctctcgccacaccggagggggccaggtggcggcggcggcagggactcggatgaggaggctgcgcgcaggggggtggatcggtatcggccccgcggaggcggcggatccggcaggctcagtaggtctaggagtcccattggtggtcggggtggaggaggcaggcggagggatggtggtggtggtggtggtggtggtggaaggaggtcgggtgcccggggtaaccgtggcggcggcggtgaccggagcgggcggcccaagaagacgcaggaggagttggatgccgagatggaggactacttcaacagcggtagcggtggaggcggtggcgctgcgcggcagagtgagggtgctgcggcgggcgctgcggcgggcatcaatggggctgttgcgcagcagcagcaacagcagaacctgggcgaggacattgacatgattgagtga

SEQ ID NO: 3387 - protein, 351 aa, Myceliophthora thermophilia
MDRALDRSLDEILEERKQNNRSSRGGRRRDRSDYPRDGVRKSFRDDAPRNLDSEWVHDKFEDYGSRRSAPRRRYSPEPTSETRGTKLRVDNLHYELTQEDLEDLFSRIGPLISLEMKYDRAGRSEGTAFVTYESRRDALQAIREYDGANAAGQPIRLTLLPGGPSAGASRGGGRSGGNHPFDSSANAGRPLAERITVPGQGRSRSLSPHRRGPGGGGGRDSDEEAARRGVDRYRPRGGGGSGRLSRSRSPIGGRGGGGRRRDGGGGGGGGGRRSGARGNRGGGGDRSGRPKKTQEELDAEMEDYFNSGSGGGGGAARQSEGAAAGAAAGINGAVAQQQQQQNLGEDIDMIE

SEQ ID NO: 3388 - DNA, 756 bp, Myceliophthora thermophilia
atggcccagacggggacctccaagtccgaggatgcctaccgcgcccaccattacttccgcttcaccttgggtgccaatgtggcgcgccaagtggtaaacgccttcatgaagtacttggctggtcgtaaatggacttcagcgcatgacgcgggtgccatgtgggaaagtctcatgtttgggggcgaggtcttcaacttcgacgcccccgtagatcccagggcggtcgagtaccccgaggatcccatgggagatgaccggtgcgggactctgtggcttgtcaaatggctggacgagagccgcgatccgtcaaatacgcgcgtgcgaaggctccgggtcgtttacagcaagagatatggcatcggatggggcgtagtagaggccccggtctacacgctcaacgatttcaggagatacaagcaaatgcacgaggtgcgccccaagatgaggcgggaaaagtacacaaacgtgaagcaagcgccgaccggcaaccgcccaagctatgacgaggaccttgggcggcaaagggccggcacgggcacgccgaattctgcctcgtcgatcacttcttctgccccgtcttctgccccgtcttcggccacgtcctcggccccgtcttataccggcggcggctacgtaggcgggggatcagggggatcacgaagcagttcctctcggcaccgaactgccggcgcattccaagctgcggatggctccgccgccgaagataaggttacctactcaaaaggtggccagtag

SEQ ID NO: 3389 - protein, 251 aa, Myceliophthora thermophilia
MAQTGTSKSEDAYRAHHYFRFTLGANVARQVVNAFMKYLAGRKWTSAHDAGAMWESLMFGGEVFNFDAPVDPRAVEYPEDPMGDDRCGTLWLVKWLDESRDPSNTRVRRLRVVYSKRYGIGWGVVEAPVYTLNDFRRYKQMHEVRPKMRREKYTNVKQAPTGNRPSYDEDLGRQRAGTGTPNSASSITSSAPSSAPSSATSSAPSYTGGGYVGGGSGGSRSSSSRHRTAGAFQAADGSAAEDKVTYSKGGQ

SEQ ID NO: 3390 - DNA, 849 bp, Myceliophthora thermophilia
atgccaccacacgaaaagagaacggcttcctgctccccatcgtcatcgagagaggacgctctcgagagtcagattgataactcgtcgaagttccatccacggccatcactacgctcgagggcatggtgccatctcaatgaaactgtccgagcctccatcctcgtcgaggtcgagctcctcatcctcaccttctacgccgtctccttccccgactttcactgcttcgcgtcgaaccaaaccggcaacaccgtcttcctgatgctcgccatcgtcctccccgaagccaacggcgtcatgttctacacggccaacatcgctgtcgccctgggtttcttcctggccgccgcctggctgaccggtcagctcggccacatcatcggcgcccgccgccgcagctggctggtcttctgcaacctggtccagacctgcctcgtctccgcggcggcggcgctgcagtacacccacagctcatcacagcacggcggcggcggcggccccctggtgctcgacacgggcgcgcccaccgccagcaccctgtggtcgatcggcctgctggcgttcgcggcgggcagccaggtggtgcaggcgcgggcgttccgcatgaccgagatcacgacggcgatggcgacggcggcctcctcgccctgcgcaaccgccggccgcaaccgccgaatcggcttcctggtcgcgctggtgctcggcacgctggccggagccttcgtcttccgcaggctcgggtccccggccgcgctggccatctcggcggcggggaagctgctggtcaccgtcatgtacctgttcaatccggccgaccggccgaaggcggagagccccgaggactctgcatga

SEQ ID NO: 3391 - protein, 282 aa, Myceliophthora thermophilia
MPPHEKRTASCSPSSSREDALESQIDNSSKFHPRPSLRSRAWCHLNETVRASILVEVELLILTFYAVSFPDFHCFASNQTGNTVFLMLAIVLPEANGVMFYTANIAVALGFFLAAAWLTGQLGHIIGARRRSWLVFCNLVQTCLVSAAAALQYTHSSSQHGGGGGPLVLDTGAPTASTLWSIGLLAFAAGSQVVQARAFRMTEITTAMATAASSPCATAGRNRRIGFLVALVLGTLAGAFVFRRLGSPAALAISAAGKLLVTVMYLFNPADRPKAESPEDSA

SEQ ID NO: 3392 - DNA, 1788 bp, Myceliophthora thermophilia
atgggcttcaagctctcgtacctgtacgcccgcccggacgtcaacccggtcacgctcaaggcccggtcaataccacttctcaatccggtcgacatttatgggcgcgtcttcttcttctcctggttcgggtttatgattgccttctgggcatggtacaccttcccacctctgttgacccataccatcaaagatgacctaggcctgtccccgacggaggtggccaactccaacattgtctccctttgtgcgaccctgctggttcgccttgtcgctggcccgctctgcgacaaattcggccctcgcaacgtctttggaggtttgctcctcgccggctccatcccgctcggccttgctccgctggtccacaacgctcggggcctctacgtgagccggttcttcattggcatccttgggggctccttcgtcccttgccaggtctggtcaactggtttcttcgacaagaatgtcatcggcaccgccaatgccctcacgggcggcttgggcaacgccggcggcggcatcacctattttatcatgccggccgtctacgacgccctcgccggggccggctacctccccggccaggcgtggcgactcacctttctcgtgcccctttccatggtcatcaccacgggcatcgccctcatcctcctctgcccggacacgccgacgggcaggtggagagaccgccacctccacggtcagcgagatggtcccctcgatctcgacgtccccagccccgccgacatcgagtcggaaaccagcgcgggcaccgatgtcgagaaagccaacagcatcgtggacgtcccgggccggatcaccgaccgcccggacccaagcgacacctttgaaaaatctcccgccgtcgctgttgccatcacgattccgatcgccggcgtcgaaccacccaacaccaacaacaacaacaacaacaacaacaaccagccgggtgcgaccgcgcctccgagctacccctccatcccatcaacagaaccgttagccacgaaaacaacaatagcaacgacaacagcagcaggagcagcagcagcaaccgagacggtccagccgccgacggcacgggagctggtgcgggtggcgttgtcgccgcaggcggcgttccacgcgctcacgtactcgtgctcgttcgggacggagctggccgtcaacggggtgctggcggcatactacgcggagcggttcccacggctgtcgcagacggaggcggccggctgggcagccgcgttcgggttcctcaatgtcgccagccggccgctgggcggcgccatcagcgacctgctgtaccggcgcttctcttcgcctccttcgtcctttgcaggagaacaaaaatgtggtggtggtggtggtggtggtggtggtggtgctaacagcgacaatgggcagagggcgttgtggtggaaaaaggggtgggtggtcgcctgcggggtcatggcgggggcgctgctgatcctgatcggggcgctgaacccgggacgggagggcgccatgttcggactggtcgccatcatggcgctcttcgcggaagccggtaacggggccaacttcagcctggtgccgcacgtgcacccgcaggccaacggtgtgctgtccgggcttaccggggcggccggcaacctcgggggcgtgctgtttgccgttgtgttccgctgcatggacgggggcaccaactacgccaagggattctggatcatcggggtcgtgaacctgggcgtgaacctgggcgtgtgctggatccccccgctgcccaaggggcaggtaggcggacggtga

SEQ ID NO: 3393 - protein, 595 aa, Myceliophthora thermophilia
MGFKLSYLYARPDVNPVTLKARSIPLLNPVDIYGRVFFFSWFGFMIAFWAWYTFPPLLTHTIKDDLGLSPTEVANSNIVSLCATLLVRLVAGPLCDKFGPRNVFGGLLLAGSIPLGLAPLVHNARGLYVSRFFIGILGGSFVPCQVWSTGFFDKNVIGTANALTGGLGNAGGGITYFIMPAVYDALAGAGYLPGQAWRLTFLVPLSMVITTGIALILLCPDTPTGRWRDRHLHGQRDGPLDLDVPSPADIESETSAGTDVEKANSIVDVPGRITDRPDPSDTFEKSPAVAVAITIPIAGVEPPNTNNNNNNNNNQPGATAPPSYPSIPSTEPLATKTTIATTTAAGAAAATETVQPPTARELVRVALSPQAAFHALTYSCSFGTELAVNGVLAAYYAERFPRLSQTEAAGWAAAFGFLNVASRPLGGAISDLLYRRFSSPPSSFAGEQKCGGGGGGGGGGANSDNGQRALWWKKGWVVACGVMAGALLILIGALNPGREGAMFGLVAIMALFAEAGNGANFSLVPHVHPQANGVLSGLTGAAGNLGGVLFAVVFRCMDGGTNYAKGFWIIGVVNLGVNLGVCWIPPLPKGQVGGR

SEQ ID NO: 3394 - DNA, 678 bp, Myceliophthora thermophilia
atgaacgctctagccaagaagctcggcctctccgacgacctaaccttctacgacgtctactcattggacgagcctgaactgctcgccatcattcccattaccccagcgtggaagaaagaccgcgaggcagaggacgaggcgctcggcgatccggccacctactacaatggcggagaggccaccggggccggggaggaaccgatcatatggttcaagcagatcatcggcgacacatgcggctcctacggcttcctacactgtgccatcaacggccagacacccaagtttatccttcccgggagcactctcgagcggctgcgcaacgacgccatgccgctgcccagggacgagcgggcccggctgctgcacgatagcaaggagtttgaggaggcccatcggtccgttgccgcgctgggggataccccagagcccagcgaggggggccccgagcacagcggccagcacttcgtagcgtacgtcaaggtgaacggccgcctctgggagctcgagggttcacgggaggggccgctggaccgaggcccgctcggggagggcgaggacgtcttgagccacagagcactggacctgggcctgaagcgcatcatgaacctgagcgccggcaccgacgaggagaacatcaactttagctgcacggttctcgccccccggacggcctga

SEQ ID NO: 3395 - protein, 225 aa, Myceliophthora thermophilia
MNALAKKLGLSDDLTFYDVYSLDEPELLAIIPITPAWKKDREAEDEALGDPATYYNGGEATGAGEEPIIWFKQIIGDTCGSYGFLHCAINGQTPKFILPGSTLERLRNDAMPLPRDERARLLHDSKEFEEAHRSVAALGDTPEPSEGGPEHSGQHFVAYVKVNGRLWELEGSREGPLDRGPLGEGEDVLSHRALDLGLKRIMNLSAGTDEENINFSCTVLAPRTA

SEQ ID NO: 3396 - DNA, 585 bp, Myceliophthora thermophilia
atgaccgcccagacgaccagcaccccaaacgagcccatcgtccctacctcgccgccagctaagcgtatcaagacggacgacggcgccaactcggctagcgaaaccatcatggactcgtccgacgccgccaagcagcagcaacagcaggagctgcagccccctccgctgctgatcaagaagctctcggacaaggcgcgcctcccgacccgcggcagcgccttcgcggcgggctacgacctgtacgccgcgcggcccacgaccatcccggcgcgcggcaaggtgctggtcgacaccgacctgagcatgtctctccccgcggggacttacggccgcatcgccccgcgctccggcctggccgccaagcactccatcgacacgggcgcgggcgtcatcgacgccgactaccgcggccacgtcaaggtgctgctgttcaaccacggcgagaccgactacgaggtgcaagagggcgaccgcatcgcgcagctcatcgtcgagcgcatctacacgcccgcggtggtcgaggtgcaggagctcgaggagagcgtgcggggcgtcaatgggttcgggagcacggggaagaactag

SEQ ID NO: 3397 - protein, 194 aa, Myceliophthora thermophilia
MTAQTTSTPNEPIVPTSPPAKRIKTDDGANSASETIMDSSDAAKQQQQQELQPPPLLIKKLSDKARLPTRGSAFAAGYDLYAARPTTIPARGKVLVDTDLSMSLPAGTYGRIAPRSGLAAKHSIDTGAGVIDADYRGHVKVLLFNHGETDYEVQEGDRIAQLIVERIYTPAVVEVQELEESVRGVNGFGSTGKN

SEQ ID NO: 3398 - DNA, 390 bp, Myceliophthora thermophilia
atgccttccgaacgcgaactccaaatatctcccatcgtgcatgagtcggtgctaacaccgcacacgcacgcatgcgccctgcctgccccggatccccagaccctctccaacctgcagacgctcgccgcctccctcttcggcgtctcggccggcattctcggcctcgagtcctactcgggcttcgtcttctacctcgtcttctcgcttctgacggcggtgctcttctacgcgctccgcgtggcgccgacttcgctggccgcgggcaagccgccgctcgacacgagccggtacttccgcggcccttacgagttctgggccgggggcctgatgaacgggctggcagggtttatcctgacctggaccctcttctacgggctggtgagggcgtga

SEQ ID NO: 3399 - protein, 129 aa, Myceliophthora thermophilia
MPSERELQISPIVHESVLTPHTHACALPAPDPQTLSNLQTLAASLFGVSAGILGLESYSGFVFYLVFSLLTAVLFYALRVAPTSLAAGKPPLDTSRYFRGPYEFWAGGLMNGLAGFILTWTLFYGLVRA

SEQ ID NO: 3400 - DNA, 2001 bp, Myceliophthora thermophilia
atgacagcgaccgaagcagagcgcccagccgaagtcgccgcaacggagtcacatccccgagagtggaccgtctcgtggtgctgcccggtgcaccggtgggaattcggttccgcgctgacgaacgcgtacctagtcacggcgacctgggccaggagatccgaccgtagagtgacgggggagataatgtcgatgtgggagtgggagcaggaatatcagcggcggcagggcgcaggcatgcatcatctgtccccgccacgagctgtccatgggacgattccgctcgagcagacactgtttactgccgacgacatagaggagtttcggcgtatcgatgacgcgcagcggcggaagcagaaatccccaaggttactcgggtcgtcaaaagatgggcaacgtgtagagcacggcgatgcttcggacacgagcggtttcgtgacgggattccccctcgcgtgcctgatggccggcctcatgtttgcccagtttctcatctcgatcgatcggacaatcatctcgacggcgattccgtacatcacccacgaattccggtcgacgcctgacatcggctggtacggctctgcgtatctgctcacggcgtgcgccttccagccgatgtttgggcgagtattcacgctcttctcaatcaaaaaagcatacctaacagccatgtttctgttcgagctcggctcgctgctttgcggggttgcaccgagctcgatcgtcctcatcgtcgggcgagcgatcgcgggcctcggcagcgcggggatattgactgggagctttgtggtagtgggcaccgccgttcctcttcagtcgcgcccgatactgatggccgtggttggcacaatgttcggtgttggcgccaccaccgggccgctactcggtggcgtctttacggacctcgtgtcgtggcgctggtgcttttacatcaacctcccgatcgggggcgcaaccgttttggcgatgctcttgttcttcaaccccaagagaagcaacaaggcggggcgtgggtttatcgagcggctcgtagacttggacctgatcggcaatgtgctgctcctaggcgcggccgtcatgttcttcctcgccctcgagtacaccacgcagggcatggcgtggggtagcgccaaggtcatcgggctcctggctgggtcgttcctagctgctctcctcttcgccgcgtggcagtggcggaaaggcgacggcgccttaatgcctcccagaatcatcacgcagcgcaccgtggcggcatcgtgcggcatggctttcatgatctatgcggcgctgatcaacctgaccttcttcttgcccgtctggttccaggcgatccgcggcgtgagcgccatgcggtcgggcgtcaacatgatcccctactttgtcgtcaacgccgtcttctcgctggcggccggctggttcgtgtccaaggtcggctacgtgacgccgcccgccgtgatcggcagcgccgttggcaccgccggcctggcgcttatgacgcagctgcgcgtcgatgcgacgacggtgcaatgggcgggctatcaagtactaacaagtgccggcttcggcatctcgatccagcagggcttcatggcggtgcagacggtactccgagaggaggacatagccatcgccacggcggccgtggtcgcgtcgcagtcgctcggcgccgccattttcctctcggtggggaatagcgtatttcagggccagctcatccgcgccacggccgcgcgcctcttggacggcctcgacatcaagaagcttatcgacggcggcgcggcctcgttccgccacctggtgcccgccgaggatctgcccgcgatgctcgagatctacaacgcggcgctcaccaaggtattcatcgtgtcggtcccgctcggtgccctgtctgccatcatctcgtgcttcatcgagtggaagtcggtcaggccagccactcgaggagacaaagagaaggccatccaacaggaatcgggtgaggaggcggagaagaatccaggatag

SEQ ID NO: 3401 - protein, 666 aa, Myceliophthora thermophilia
MTATEAERPAEVAATESHPREWTVSWCCPVHRWEFGSALTNAYLVTATWARRSDRRVTGEIMSMWEWEQEYQRRQGAGMHHLSPPRAVHGTIPLEQTLFTADDIEEFRRIDDAQRRKQKSPRLLGSSKDGQRVEHGDASDTSGFVTGFPLACLMAGLMFAQFLISIDRTIISTAIPYITHEFRSTPDIGWYGSAYLLTACAFQPMFGRVFTLFSIKKAYLTAMFLFELGSLLCGVAPSSIVLIVGRAIAGLGSAGILTGSFVVVGTAVPLQSRPILMAVVGTMFGVGATTGPLLGGVFTDLVSWRWCFYINLPIGGATVLAMLLFFNPKRSNKAGRGFIERLVDLDLIGNVLLLGAAVMFFLALEYTTQGMAWGSAKVIGLLAGSFLAALLFAAWQWRKGDGALMPPRIITQRTVAASCGMAFMIYAALINLTFFLPVWFQAIRGVSAMRSGVNMIPYFVVNAVFSLAAGWFVSKVGYVTPPAVIGSAVGTAGLALMTQLRVDATTVQWAGYQVLTSAGFGISIQQGFMAVQTVLREEDIAIATAAVVASQSLGAAIFLSVGNSVFQGQLIRATAARLLDGLDIKKLIDGGAASFRHLVPAEDLPAMLEIYNAALTKVFIVSVPLGALSAIISCFIEWKSVRPATRGDKEKAIQQESGEEAEKNPG

SEQ ID NO: 3402 - DNA, 2133 bp, Myceliophthora thermophilia
atggccctgcctcaagcttcgcttcggcgtttgggtgccgtcggccaacggcaactcggaggtctgcgagttcctctccgcccgcaattgcttcacctcgggagatttcaggtctgcactcgtcttacacacagtgctgctcagtccaaggctgctgagggtgtaacacccgaccaaaaggcggtcggacagcagttgcgagaagaatggtctagatataattcgttcccgaagccgtccggcgcgcgggactttaaggagggtcagaccgtcacggtccacggcttcctcgcaagaaaacggataaagtcgtccaagctcgcattcgcagatattcagattgacaatgggcctgccgtccaaatcacctcgagtttccaagagcccgacagcccgggccatgcggcaaaccaggccctccggagcatcgccctctacagcccagtctcggtcacgggcaccgttgcccgactacacttcgacacacaaactgggcaagcacagtccccttgtgtagatcacgagaatgcgtcttcgagacccggcagttttccggagcacgtcttccgtatcgaccttgacctacaatccatccagcccctgaacgtcttccccaaggacatcatcgtctccaagggtgtccagtttcctccctcggctcgccatctccaagtccggttctcggaccccctgcgcacccgtctgctcgttcggccgcaaatagcgttccggctgaggcagtctctgaacgaccttgccttcaccgaggtcgaaactcccgttctgttcaagtccacgcctgagggggcgagggaattcctggttccgacaaggcgccctggtctagcatacgctctgccacagagcccccaacaatacaagcagatgctcatggccagcggcatcagagaaatgtcgttcgccacgggcgaagatgtcatgcgaacggtcgagtcgatcatttctgacctggccgtcttcctggactcggacttctgtgtcgtggatgaaggcgaggagacatacctcgcgccgagaaagagtttgaaggcaaagaaccgagaggattccgctccgggctcgcggtacatgatgccgccgttcccccgtatgtcttacgaagaggtcatgacgaggttcggcatagacaagcccgacttgagaattccatttgagcttcaccgggttgatcacatcctgccccggtcgtttgtttccatgatcacccatctcgaaaacccgattgtggagggcttcagattccgccccagctccggagaaggaagcgaggtttccatgtctggtttcgtggacgaattgatgaggaccctacccccggcccttgcccagaatccggacggggcaccggtcgcactcgtcgtcgactcttcgaagccgctccggggcctctcacctctcgggtttgaaggcgccggtgctctggagagcggcgaggctcccggctttggcgatctggaggacggcgacgtggttgtcttccaggctcgccaagacaagtcattccagggtggttccaccgctctgggggcgaagaaaaaaaaagtataccaggcggccgtgtccaagggcctgcttcccaaggaccgaagtttcaagttcctatgggtcaccaacttccccatgttcacgcccgacaacgagacagaccccggtcagggcggacaggccggtttctcggcgacccatcacccgttcactgcgccgctgacggacgaggacgtcgagctgctcgcgaccgaccccctgaaggcgagggctgaccactacgaccttgtcgtcaacggggtcgagctgggtggggggagtcgacgtatccacgtggccaggatgcaggagtacgtcatgagggagattctcaagatgaccgacgcgggcgtcgctcagttctcccacctcctcgaggctctgcgtgctggttgtccgccccacgcgggattcgccctcgggttcgaccgtcttgtcgcggttcttacctacaccgactcggtccgcgacgtcatcgcgttccccaagtcgatgaagggcgaggatttgaccgtcaagagtcccggtcgtgtcaccaaggagcagctcgaaacctaccatttgaccaccttccccggaaagaactga

SEQ ID NO: 3403 - protein, 710 aa, Myceliophthora thermophilia
MALPQASLRRLGAVGQRQLGGLRVPLRPQLLHLGRFQVCTRLTHSAAQSKAAEGVTPDQKAVGQQLREEWSRYNSFPKPSGARDFKEGQTVTVHGFLARKRIKSSKLAFADIQIDNGPAVQITSSFQEPDSPGHAANQALRSIALYSPVSVTGTVARLHFDTQTGQAQSPCVDHENASSRPGSFPEHVFRIDLDLQSIQPLNVFPKDIIVSKGVQFPPSARHLQVRFSDPLRTRLLVRPQIAFRLRQSLNDLAFTEVETPVLFKSTPEGAREFLVPTRRPGLAYALPQSPQQYKQMLMASGIREMSFATGEDVMRTVESIISDLAVFLDSDFCVVDEGEETYLAPRKSLKAKNREDSAPGSRYMMPPFPRMSYEEVMTRFGIDKPDLRIPFELHRVDHILPRSFVSMITHLENPIVEGFRFRPSSGEGSEVSMSGFVDELMRTLPPALAQNPDGAPVALVVDSSKPLRGLSPLGFEGAGALESGEAPGFGDLEDGDVVVFQARQDKSFQGGSTALGAKKKKVYQAAVSKGLLPKDRSFKFLWVTNFPMFTPDNETDPGQGGQAGFSATHHPFTAPLTDEDVELLATDPLKARADHYDLVVNGVELGGGSRRIHVARMQEYVMREILKMTDAGVAQFSHLLEALRAGCPPHAGFALGFDRLVAVLTYTDSVRDVIAFPKSMKGEDLTVKSPGRVTKEQLETYHLTTFPGKN

SEQ ID NO: 3404 - DNA, 777 bp, Myceliophthora thermophilia
atggatacaacgagcggcaatgcgggctctgccgcgatgcccgagagcgggcagcaggaaaataataagaacgggttcaagctgaggttctgcaccgtctgtgccagcaatcagaaccggtcaatggaagggcacctccgcctcgctcaggccaactaccccgtcatctcgttcggcaccgggtctctggtgcgcctgcccgggcccaccatcacccagcccaacgtctacaagttcaacgagacctcgtacgacagcatctaccgggagctcgaggccaaggacccccgcctgtaccgggcgaacgggctgctcaacatgctggggcggaaccgcatcatcaagtggggccccgagcgttggcaggactggcaggtcgggatgccgagggtcaagcacgagaaggaccaagggagcgccggcatggaggcgggcgtgcccgacatcgtcatcacctgcgaggagcgctgctgggacgccgtggttgacgaccttctccaacgcggctctcccctgaaccggcccgtccacgtgatcaacatcgacatcaaggacaaccaccaggacgcctcgatcggcggcggggccatcgtcgacctggctgactccctgaataaggtggctcaggaggagcgcgagagagtaggagctgccctctttgattctggggccgccggcagccgggcgagcttcgacgagcgggtgcccgaggttctaagcgagtggcaagagaggtggcctgggctgccgtcaacgtggacattgtcttggttctga

SEQ ID NO: 3405 - protein, 258 aa, Myceliophthora thermophilia
MDTTSGNAGSAAMPESGQQENNKNGFKLRFCTVCASNQNRSMEGHLRLAQANYPVISFGTGSLVRLPGPTITQPNVYKFNETSYDSIYRELEAKDPRLYRANGLLNMLGRNRIIKWGPERWQDWQVGMPRVKHEKDQGSAGMEAGVPDIVITCEERCWDAVVDDLLQRGSPLNRPVHVINIDIKDNHQDASIGGGAIVDLADSLNKVAQEERERVGAALFDSGAAGSRASFDERVPEVLSEWQERWPGLPSTWTLSWF

SEQ ID NO: 3406 - DNA, 1518 bp, Myceliophthora thermophilia
atgagttgcagcatttgtcaccgcccgcacgatgcgaagaagctgccgtttctttgtgtggtcgatgccaggaatgtcctctacgagagccgcgtcgagtatgctcaggcgctgatcgacagcgaagaggccgagcgccaggttgaggccgtcttgttgggccaggaaggatcgtcgacagcccagaagccgacatcgagtgcccgcatcgatcggctgagagctgaggaggcggccgcccgcgaccgaacgaaccagatcattgcccaggccgaccggttgaagagggagatggaggctgcgcggaaggagattgcggcgaagaaagacgcaatttccaggcggaagtcggatctagcatcggtctcggctggtatcgcggcaaggcggaacagacagctggaggaggtggagcggtccacccaaagactgaagtacaagtggaatcgtgttgccgacgacatggccgatatcagggcatttctgtgtgaaggatccgctcggttgtatggacttcgtcagatcaaaaagggcagcgtcaagcggtacgagattggcggtgtcgagatattcgacctccatgccatgaacagtctgtcacccgagatgatttcgacatcctttgcgcacattgctcatattttggtgctggctgctcgttatctgggtcttcggttgccggcagagattacgccgccccatgccgactatcctcggccaaccgtcttctcgcttgcgtcgtcttacaagcatggagaagtcccttttcccgggtcgctaacggcgcagattccatcggtagtcggtgacggcgccgagaaggagcatgtcccacggcctcggccgctgttcattgagaagccgcttcccacgctggccaaggaagacccctctgcatataagctgttcctggagggcgcggctctgctggcgtacgacatcgcctgggcgtgctgctcgcagggcgtgtcaattggcgacaaggactcgtatgaggatgtgtgcaatatcggccagaatctctggcgtctcctgattggtgaccagcttcaccgtcgatctgtgcagccgacattccgttctccgctcaccccgcccgccggaagccccagagacgacggccgcggtgagatcgccaacccacggtcaacgattggtcgctggtcgcacgcaacgctgcatagctatcttgggggacccgaggggacggaattcgtccggagctttaagattgtaccgccgttaaagctggccgatcgactgaagcagcgcttgtcgagcgaggctccgatgctggaatgggagaagattgagggcgacgagctcgacgatggtttcgacgacggggtgtttgtgcgaggtcacggcgctggcagatctgctccgcgacgtggagatctcgacgctgctagcgttatgacggtgcggactgttgggtcaagcgacggggccgctcccgagaatcgtgccaacactggcagggggacaagtggctggacgaggctaaagagccgatag

SEQ ID NO: 3407 - protein, 505 aa, Myceliophthora thermophilia
MSCSICHRPHDAKKLPFLCVVDARNVLYESRVEYAQALIDSEEAERQVEAVLLGQEGSSTAQKPTSSARIDRLRAEEAAARDRTNQIIAQADRLKREMEAARKEIAAKKDAISRRKSDLASVSAGIAARRNRQLEEVERSTQRLKYKWNRVADDMADIRAFLCEGSARLYGLRQIKKGSVKRYEIGGVEIFDLHAMNSLSPEMISTSFAHIAHILVLAARYLGLRLPAEITPPHADYPRPTVFSLASSYKHGEVPFPGSLTAQIPSVVGDGAEKEHVPRPRPLFIEKPLPTLAKEDPSAYKLFLEGAALLAYDIAWACCSQGVSIGDKDSYEDVCNIGQNLWRLLIGDQLHRRSVQPTFRSPLTPPAGSPRDDGRGEIANPRSTIGRWSHATLHSYLGGPEGTEFVRSFKIVPPLKLADRLKQRLSSEAPMLEWEKIEGDELDDGFDDGVFVRGHGAGRSAPRRGDLDAASVMTVRTVGSSDGAAPENRANTGRGTSGWTRLKSR

SEQ ID NO: 3408 - DNA, 834 bp, Myceliophthora thermophilia
atgtctaccaccatggaaccaggcctgaagatgttgcgatccaaccggctaaagcgggtcttcaccgaggaccggcgtccggccatgggtttctggcagatgctgcctggtgccaacatctccaggatcttggcaagatcaggcgctgactgggtcatggtggactgcgaacatggcaacatcgatgatgccgcgatgcacgaggcggttccagccatcgcagccctggatgtatcaccaatcgttcgcctgccgggcaccgaatcgtggatggtgaagcgggccttggatacaggagcacatggtatcttggtcccactcatccggaccgtcgaggaggtcaagagtgtcgtagcggcggccaagtttccaccggaggggcagcgaggattcggctcccccttcgtgctgcagaattttgaagcaggattgaccctaaccgaatatctgcagcaagcaaacgacaaccttttgacaatggtgcagatcgagacccgggaagcgctggacttggtcgaagaaatagcgcctttagtagatgtggtgtttatcgggccgtacgaccttggaaacaatattggtcatcctatcctcggcggtaagatggaccccgaactgcacgacgccatcgcgagggtcttgaaggcagccgtggcagctggcaagaagtgcggcatctattgcatttcgggtgctcaagcgaagcagtatgcggacatggggtttcacatgatcagcgtggcgactgattactcgaccctgggtgaagcaatggtggaacgtcttaccatcgctcggggccaagcagaggaagagaagggcggttcatattag

SEQ ID NO: 3409 - protein, 277 aa, Myceliophthora thermophilia
MSTTMEPGLKMLRSNRLKRVFTEDRRPAMGFWQMLPGANISRILARSGADWVMVDCEHGNIDDAAMHEAVPAIAALDVSPIVRLPGTESWMVKRALDTGAHGILVPLIRTVEEVKSVVAAAKFPPEGQRGFGSPFVLQNFEAGLTLTEYLQQANDNLLTMVQIETREALDLVEEIAPLVDVVFIGPYDLGNNIGHPILGGKMDPELHDAIARVLKAAVAAGKKCGIYCISGAQAKQYADMGFHMISVATDYSTLGEAMVERLTIARGQAEEEKGGSY

SEQ ID NO: 3410 - DNA, 1314 bp, Myceliophthora thermophilia
atggcgcctaagaaccgcatcattatcgatactgatccaggtgtcgacgatgtcttggccctgctgctggccctcagcgcctctccggaggatctcgaggttgcaatgatctcggtcacgtatggcaacgtgccgttgcagagctgcctccgtaacgtcgtggccttgttccacgtgctcgagaaggagatggcctggcgcgagtcgacaggcaagcccatctacggcgcattaaacgcctacaagcccatcgtcgccgtcggcgctgagcatgccctcgaagatgagcagcttgtagccgaccacttccatggtgctgatggcctgcacggcgtgcatgaggcgcacccttacctgtcgcccgccgacacctggaagaccctgttcgaggacgcgcccagtgactccaacgccaatgccgagccgccctcatactcgaggttcttcaccccgagcaagaggcccgctcacaaggagatactacggatcctcagggaggagccggagaataccatctccattgtggctatcggcccccttaccaacgttgccctggcggcagcggaagaccccgagacgttcctgcgggtcaaggagctcgtggtgatgggaggcgccgtgggtgtcgagggcaacgtcagcccgtgcgccgagttcaactgcctcgccgacgcagtcgccgctgcccgcgtcttcgccctgacctcgctcgtcccctcagcgaccatgccgcccaccattcacgggaaatccgtcttgcccccgtacccggccaagctgtccaagcaactgaagctgaccctcttcccgctcgacatcaccaccccgcacgagctcaggaaacatgtctttaatgacaagatccagcctctcaaggaagccggcagccctctggctcagtggaccgacaccttcatgaacggcaccttcaacaagatcgactcgattctcggcgacggccacgacgcgggcttgtcactgcacgaccccctgtgcatctggtacatgctgacccacgaccaccccgcgtggaagacggtgcccaagcccgaggacatccgcattgagacgtgcggacagtggaccaggggcatgcacgtcatcgacaggcgaaaacgggccaagcccgccgagaagaacggcgccgtgcaaacgcacccggaggatcctatggatgccatgaccctggacgaggtccccggcgacaccatgggctggctgagcgtgcgcaaggggaacaggatcaacaggatgctcgagtcgcccggacaggacacatttgcggggatcctccttgataaggtttttgcgtag

SEQ ID NO: 3411 - protein, 437 aa, Myceliophthora thermophilia
MAPKNRIIIDTDPGVDDVLALLLALSASPEDLEVAMISVTYGNVPLQSCLRNVVALFHVLEKEMAWRESTGKPIYGALNAYKPIVAVGAEHALEDEQLVADHFHGADGLHGVHEAHPYLSPADTWKTLFEDAPSDSNANAEPPSYSRFFTPSKRPAHKEILRILREEPENTISIVAIGPLTNVALAAAEDPETFLRVKELVVMGGAVGVEGNVSPCAEFNCLADAVAAARVFALTSLVPSATMPPTIHGKSVLPPYPAKLSKQLKLTLFPLDITTPHELRKHVFNDKIQPLKEAGSPLAQWTDTFMNGTFNKIDSILGDGHDAGLSLHDPLCIWYMLTHDHPAWKTVPKPEDIRIETCGQWTRGMHVIDRRKRAKPAEKNGAVQTHPEDPMDAMTLDEVPGDTMGWLSVRKGNRINRMLESPGQDTFAGILLDKVFA

SEQ ID NO: 3412 - DNA, 738 bp, Myceliophthora thermophilia
atgggaagcgcggagccggcagcatccgcctttgcggcgccaccagagtccgtcacgttcgacggcctcctgttcgatatggacggcacaatcatcgactcgaccgacgccgtcgtcaagcactggcaggcgatcggccgggaaataggagtcgagcccgaagttatcctgcagacttctcacggacggagaaccatcgataccctccaactcttggcccctgagaaggcaaactgggagtacgtcaagcaaatggagggtctcctgcccaagctctacggaaacgacgccgtcgagattcccggcgcccgcgctctcctgcaagacctaatcgcccagtccgcgccgtggaccattgtcacgtcggggagtcttccgctcgtatctggctggctcaccgtcctcaacctcccgacccctccccacctggtaacggccgagtccgtggccgtcgggaagccggacccggcctgctaccggctcgggcgggaacgtctcggcatcagcggcgccgagaagcaggtcctcgtcctcgaggacagccccgccggcatccgggccggcaaggcggccgggtgcaaggtgctcgccgtggtcaccagccatacggtcgagcaggtgctgggcgccgagcccgactgggtggtccgtgacctgtcgtccctgaggttggtcagcgtggagggcggcagggtgacgctggagatccgggatgcgttgcttgtcaagacggagtaa

SEQ ID NO: 3413 - protein, 245 aa, Myceliophthora thermophilia
MGSAEPAASAFAAPPESVTFDGLLFDMDGTIIDSTDAVVKHWQAIGREIGVEPEVILQTSHGRRTIDTLQLLAPEKANWEYVKQMEGLLPKLYGNDAVEIPGARALLQDLIAQSAPWTIVTSGSLPLVSGWLTVLNLPTPPHLVTAESVAVGKPDPACYRLGRERLGISGAEKQVLVLEDSPAGIRAGKAAGCKVLAVVTSHTVEQVLGAEPDWVVRDLSSLRLVSVEGGRVTLEIRDALLVKTE

SEQ ID NO: 3414 - DNA, 1959 bp, Myceliophthora thermophilia
atggcagccccgcaactgcagccgtcttctcccccgtcctccccgctctccgttctctcgcaatcgccctctccgcccagcccggcgctggccacctccaagccctacccctcgccctcttccagcgctcacacgtcaggtagcgcgtcgccattaaagccttgcgacatgttggattccaccgaggaaatccgggtgcggacagacgagcccccgccgcccaagcgccgccgcattgcggcccctcccaaaccacgcacgactgcctacatcgacctggagaagcgcggcgtggaggaggacgagaatctccagaggctcctgtcggctctgcggaagaagaagaagattgtggtcattgcgggcgcaggcatctccgtttccgcagggatcccagactttcgctcgtccacgggcttgtttgccactctccgtggacagcacaagctcaaggcgtccgggaagcacctctttgacgcgtcagtgtacaagcacgatgcgtcaactgagtccttccacaccatggtccgtgagctggcccagatcacgtccaaggcgaagccaactccctttcaccacatgctcgcctcaatcgccgccgaggggagacttttgcgcatgtatagccagaacatcgataccctcgacacccagatgccgccgctggcaacaacggttcctctgaacaccaagggaccatggcccactaccgtccagcttcacggcgggctcgagaagatggtttgcacaaagtgcggccacatagaacccttcaatgcgtctctatttgagggcccggagcccccattgtgcgagaattgcaaagaacaggacgaagtacggaccgcctttgcaggaaaacgcagccacggaatcggcaggctcaggccccgcatagtcctgtacaacgagtacaatcccgacgaggaggctatcgggaatgtgtccaaggccgacctgcggagggtgcccgacgcggttatcgtggtgggcacgagtctcaagattcccggagtgcggaggattgtcaaggaaatgtgtcagttgacccggagcagaagggacggcctcacagcgtggatcaacattgatccagagccccaaggcgccgagttcaaagactgctgggatcttgtcgtgcgcgcaaagtccgacgatatcgcagaactcgtcaacctgccgcgttgggaccagcaagacataggagatcccaagggctacatggtctcgggagacgaacagaaggagaagcggtgtgcagacagtctgaaacgcgacagggtcgacgtcttgctcgagcgcaagcgctcaggaggcgcagacaaggacgggttcgtctccccgcaagcgtcgcagacgattacggaccagacgccgcggccgctcgagcaaggaagcatgcccaccccgagcgggagcccacgggctctcagcccggtttccacggccaaaccggtggccaagggccagtcgaagcagagcaccctcaccttcggcaatggcctcccttcgaaacctacccaaccgtcgaaaaaagcacccgccaagcggaaatcccgccaaccgaggagagagcccacgaagcccaaaaacaggctggaccagactttccgcgccacaaaggccagcgctgcggcgcctctcaaagacgcccaaacgccacagaaacagcccccttccgacccatactcctcagacctatcctcccctctcgacttgccaaacgacttcgtcagcctgccctcgctgcgtcccgaaaacaaggtcggcaaggtcgccccgctcaccatcctcaccaagccgccagacgccgatgggtacgccgcggcgtggcagccgggaagaaagggcgaggacggcacgctgacgacgcctaccgaggactcgaacgcggcagcagccctggggaccatctcgcctcggtcgaagcccaggagcatggggcatcttatcgattga

SEQ ID NO: 3415 - protein, 652 aa, Myceliophthora thermophilia
MAAPQLQPSSPPSSPLSVLSQSPSPPSPALATSKPYPSPSSSAHTSGSASPLKPCDMLDSTEEIRVRTDEPPPPKRRRIAAPPKPRTTAYIDLEKRGVEEDENLQRLLSALRKKKKIVVIAGAGISVSAGIPDFRSSTGLFATLRGQHKLKASGKHLFDASVYKHDASTESFHTMVRELAQITSKAKPTPFHHMLASIAAEGRLLRMYSQNIDTLDTQMPPLATTVPLNTKGPWPTTVQLHGGLEKMVCTKCGHIEPFNASLFEGPEPPLCENCKEQDEVRTAFAGKRSHGIGRLRPRIVLYNEYNPDEEAIGNVSKADLRRVPDAVIVVGTSLKIPGVRRIVKEMCQLTRSRRDGLTAWINIDPEPQGAEFKDCWDLVVRAKSDDIAELVNLPRWDQQDIGDPKGYMVSGDEQKEKRCADSLKRDRVDVLLERKRSGGADKDGFVSPQASQTITDQTPRPLEQGSMPTPSGSPRALSPVSTAKPVAKGQSKQSTLTFGNGLPSKPTQPSKKAPAKRKSRQPRREPTKPKNRLDQTFRATKASAAAPLKDAQTPQKQPPSDPYSSDLSSPLDLPNDFVSLPSLRPENKVGKVAPLTILTKPPDADGYAAAWQPGRKGEDGTLTTPTEDSNAAAALGTISPRSKPRSMGHLID

SEQ ID NO: 3416 - DNA, 225 bp, Myceliophthora thermophilia
atgcagcacgcagcaaagcctcctgacagcagggctgctgatgcatgggacggttcagctctgaccactccaccagcgcctgtgatttttctggacacctggcgtaacctcgatcccgccaaggggcgagacttcaaggtgcgccaaagctcagcagagggtggtccaagctcccttcccagtctggatccggtcaatgtgagaagccgcttgttcggaatctag

SEQ ID NO: 3417 - protein, 74 aa, Myceliophthora thermophilia
MQHAAKPPDSRAADAWDGSALTTPPAPVIFLDTWRNLDPAKGRDFKVRQSSAEGGPSSLPSLDPVNVRSRLFGI

SEQ ID NO: 3418 - DNA, 537 bp, Myceliophthora thermophilia
atgccgccgccagtcgcggcaagcgccgatcgaggtgacgctcggcgtcttcgaaaaccgtcaacgctctacaagctggtcatgacccccgtcctcttcgtctccttcctcctctccctcgccctcgtcgacctgcgctactcgtccctccgcgccctctaccacgccgacagtggcgaccagccgcccggccgccgccggctgccgggctggctgcacagaatcatctaccgctaccggccgtaccgatacgccgtcgcggtcgatggcgacggccgacccgtcgggaccaccacgaccccccggagcccggggagcccagagggtggggccaccccttccaggacggcgagagaggcggaggattactaccacagtaagcagcgggagctgatcaagatggaggcggaggaggcatttgagatccgcggtgtggttgtcttggtgctgggcttcgttgggttggcggtgctgtgggcggcttggaaggtggtcagctggggggtaggggctgtctaccggtcgatgacatcttga

SEQ ID NO: 3419 - protein, 178 aa, Myceliophthora thermophilia
MPPPVAASADRGDARRLRKPSTLYKLVMTPVLFVSFLLSLALVDLRYSSLRALYHADSGDQPPGRRRLPGWLHRIIYRYRPYRYAVAVDGDGRPVGTTTTPRSPGSPEGGATPSRTAREAEDYYHSKQRELIKMEAEEAFEIRGVVVLVLGFVGLAVLWAAWKVVSWGVGAVYRSMTS

SEQ ID NO: 3420 - DNA, 1788 bp, Myceliophthora thermophilia
atggctgcccccagcgtgcccgacgacgcttacgccaccgcgctctcccgtctggcgcagctccagtccaaccgtgccgtcacctctctcttcgaccctgccccagcaacagccgccgcttcagcaggaggagcaggaggaggaggaggagggggaggcggcaaacccgccgacctaaacgccctggccattcccgagatgctcgcctggctcggccgggcagggtacacgcccgcgtcgctggccgccttgccggtgcggttcgtgcacgtggcggggaccaagggcaagggcagcgtcagcgcgctgatcgcgtccgtcctggcgcagtaccccggggccgggcgggttggcttgtacacgtcgccgcacgtgctgtcggtgcgcgagcggatcgtgctggacggcgccccgatcgcgcccgaccggttcgcgcgctacgtcgcagaggtctgggaccggctgaccgaggcagcgcggcgggaggccgccgaggccaagctcaaggccggggccggggccgggaccgggaccgggggtggtggcaaggggggttcgccaccacagccgcccccgcagccacgcgtcagcctaacatttgtagaggaggatgagctgctgaccgccgccgcccccgccgccgcgcgtcagctgcacgcggccgaggaggaggagctgctgagcgggccggcgaccaagccgttctatttccgcttcctgaccctcgtggcgctgcatgcgttcgtctccgagggcggccgtggcctgcgcagcgccgtggtcgagtgcggcatcggcggcgagtacgactcgaccaacgtgctgcccagggagggcgtcacggccacggtggtgacgcagctggggatcgaccacgtcggcatgctgggcgacacggtcaacaagatcgcgtggcacaagagcggcatcttcaaggaaggcgtcaaggccttcaccaggcggctgcccgaggcgcaagagcaccagcgcggcgtcatggaggtgctgcgccggcgggcgcgcgagaagggcgccgtcctggtcgaggtgccggacgaggaggtcgagcggtggggaggggtcgacggcgcccgcctgcaggggccgtttcagaagtacaacatggccctggccgtccacgccgcgagggagcacctgctgcgcgtcggggtcaggttcgagggcaggttcgggacggacgagtggttgctcggcgacatgccgcccgagttcgtccgggggctgcgcgaggccgccctgcgcgggcgctgcgaggtgctccgggacgcgcagcagggcaccatcatcgagtggcacgtcgacggcgcgcacaccgacgacagtctggccggggtgggccggtggttcgcggacagggcgggtggcgacgacaacgacggcggcggcggcggcagcgtgcgggtattgctgttcaaccagcaggagagggatccggcgccgctgttgagggcgcttctatctggagcgcagagcggcggccggaccgccttcgaccatgccatatttacgaggaacgaagaggaggaaccggcagatggcgaggaacgcgacctctctacgcagatcagggcacaggagacgatgcaggaggccgccgacggcacgaccaccacgacggtgcacaacgccgtccgtcccgcggtggagcagatcaggcatatcgcggcgcaggcgagggagcaagggaagccgtgccgggtgctggttacgggaagtttccacctggcgggcgccgtgctcaagatcattgaccatgccgaatactaa

SEQ ID NO: 3421 - protein, 595 aa, Myceliophthora thermophilia
MAAPSVPDDAYATALSRLAQLQSNRAVTSLFDPAPATAAASAGGAGGGGGGGGGKPADLNALAIPEMLAWLGRAGYTPASLAALPVRFVHVAGTKGKGSVSALIASVLAQYPGAGRVGLYTSPHVLSVRERIVLDGAPIAPDRFARYVAEVWDRLTEAARREAAEAKLKAGAGAGTGTGGGGKGGSPPQPPPQPRVSLTFVEEDELLTAAAPAAARQLHAAEEEELLSGPATKPFYFRFLTLVALHAFVSEGGRGLRSAVVECGIGGEYDSTNVLPREGVTATVVTQLGIDHVGMLGDTVNKIAWHKSGIFKEGVKAFTRRLPEAQEHQRGVMEVLRRRAREKGAVLVEVPDEEVERWGGVDGARLQGPFQKYNMALAVHAAREHLLRVGVRFEGRFGTDEWLLGDMPPEFVRGLREAALRGRCEVLRDAQQGTIIEWHVDGAHTDDSLAGVGRWFADRAGGDDNDGGGGGSVRVLLFNQQERDPAPLLRALLSGAQSGGRTAFDHAIFTRNEEEEPADGEERDLSTQIRAQETMQEAADGTTTTTVHNAVRPAVEQIRHIAAQAREQGKPCRVLVTGSFHLAGAVLKIIDHAEY

SEQ ID NO: 3422 - DNA, 318 bp, Myceliophthora thermophilia
atgtctgcccaagaatattaccaacaaggcccggcacccaacggctacggcggccaggcgcagtacccgcagtcgtaccctcagcagtaccctcagcaataccctcaacagccgcagcctccgcgctatgttgttgcttcgtttgcgaggagggatgtgaatgctgtgcggactgctgcgagtgttgtctggagttctgctgaatacacccaagagtctctccacggcgaagaaggttctgcggaggctgtcgatcggggaccgccgcctccataccgaccgacccatgtatgtacgttgaacatggaggcgccttag

SEQ ID NO: 3423 - protein, 105 aa, Myceliophthora thermophilia
MSAQEYYQQGPAPNGYGGQAQYPQSYPQQYPQQYPQQPQPPRYVVASFARRDVNAVRTAASVVWSSAEYTQESLHGEEGSAEAVDRGPPPPYRPTHVCTLNMEAP

SEQ ID NO: 3424 - DNA, 2457 bp, Myceliophthora thermophilia
atggcgtcgctgaacctttcaacaaacggtccctcaatcaagagcagctactcaagcgtcatcaatggacccgccctctcctcaacctctccgaccgcggcgcgctgggccctcttcacagtgcaggcgccgctagtgagcgccttccaaaacacgggagcaaaggaaagcgtcctgaaggttgagagcactggcgatggcgagcttgccaacctcgtcgaggagttcagcgaaggccgtattcagttcgctttcgttcgagtcaaagacccaaactcgggtctccccaagaatgtgctgatcgcctggtgcggcggaggcgtccctgagcgcaccaagggttactttacgagccacactgctgccgtatctaaggtcttgcacggctaccatgtccagattacagcgcgctccgaggctgatctcgtcccggaggacatcgtgcaaaaggtggcggatgcatcgggtgccaaatactcgtcgggaacatccacaccagccccgtcggcgccgcccccggtttccaaaaagcccgtcttcacaccgacaacatccgggtctgggagctcttacaacccgctcgtcgctgcgcgcactcagagaccggtgaacactgacgatgatggctggggcgcggacgcaccaccggttacacgtaccgaattagagaaggtcgaacctgcctacaagccgacgaaggtagatatcgcaagcctcagaaaaaacaaggacgactctcggttcgatacgccctcgagacaagatgaccgtccgagcgacatcgtgaaggggggttaccaacccgtgggcaaggttgatattgctgcgcttagggcacaggcgaagcaggatgataagcctaccgtcgtgaagggcgcttatgagcccgtaggcaaggtcgacatcgctgccctccgagcgagatcgcagcgtccggccgaggaggaggagtcggcgccggcgccaaagagccttgccgagcggagcgccgccttcacatcgtcagaacgtctcacagaactgccgaagcccaaagtcgcaaagaagttcggtgccacgcccttcactggcaccaaggctccaactcccgtggggctcggctttggctcgccatcagcccctccgccgccacccgtcggctccgccagccggacgtttgctgatcagggaggcaagactccagctcagatatgggccgaaaagaagggcaagcaggccggtgtggctgtcggctcgccatctccgcccgtcactacaccgatcgccgcccagaagagtggcagcgagtggaagagcggctacaccggtaaaagctgggcaccggtacaaaccaccaacttcggccgaggcggtgtggagaagcaaaagacgggagaaacagaacggtctgaaccagaggtgcagcaacccgtcacgacgggcagcggtggtgtttctgcactgcgtgacaagtttagggacgcggcgcctatgggcatcccaacccgctctgttccggatgctgcggctgggtcagagaacgagccggccccgccgcccccgcccatggaaagtcggcctgctggtggctttgctctgcccgggttaccctccagacctgcagcccggaatcaggaagaagaggaggaggcggaggtggcaccgtctatcccgtcacgcaactacgaggagcgtgaaccgttgccggttcgtgttgcgatgccggttccccgcagtgccgcacccgagattgagtccgcggctgagagtctcccttcccgtcctattccggttccgccggaggtgcccaaggaggaagagctcccggccgactctgagacgcacaaccctcgagcggccgccgcagccgtggccggtgtcaccgctgcagccgcggctggcgcggcggtagcgcacgcagcagatgacaccgcgccaagcaaggccgacgcgaccagtggtggcaagagggctttggttcaatatgactacgagaaggcagaagacaacgagattgagctccgggagggcgaatacgtgactaacatcgagatggtgcatgacgattggtggatgggcaccaattctcgaggcgagagcggtctgttccccagcaattacgtcgaaatcattgacgaagaagagggagccgccgctgcgcaaccggccgcccctgcgccggccgcccctgcgccggcagcgcaacaggaggagcctccagctgcgacatccggtccgacggcgacagctcaattcgactacgaagctgcagaagataacggtacgcagtccctcggttatccctgcgttgaacatgacatcaaatgggcggcactgacatattatgttgcagaactgagctttcctgagggcgcattgatcaccgacttagacttcccctccgaagattggtggtttggtcactacaatggtgcttctggcttgttccctgccaattatgtccagcttaactcctag

SEQ ID NO: 3425 - protein, 818 aa, Myceliophthora thermophilia
MASLNLSTNGPSIKSSYSSVINGPALSSTSPTAARWALFTVQAPLVSAFQNTGAKESVLKVESTGDGELANLVEEFSEGRIQFAFVRVKDPNSGLPKNVLIAWCGGGVPERTKGYFTSHTAAVSKVLHGYHVQITARSEADLVPEDIVQKVADASGAKYSSGTSTPAPSAPPPVSKKPVFTPTTSGSGSSYNPLVAARTQRPVNTDDDGWGADAPPVTRTELEKVEPAYKPTKVDIASLRKNKDDSRFDTPSRQDDRPSDIVKGGYQPVGKVDIAALRAQAKQDDKPTVVKGAYEPVGKVDIAALRARSQRPAEEEESAPAPKSLAERSAAFTSSERLTELPKPKVAKKFGATPFTGTKAPTPVGLGFGSPSAPPPPPVGSASRTFADQGGKTPAQIWAEKKGKQAGVAVGSPSPPVTTPIAAQKSGSEWKSGYTGKSWAPVQTTNFGRGGVEKQKTGETERSEPEVQQPVTTGSGGVSALRDKFRDAAPMGIPTRSVPDAAAGSENEPAPPPPPMESRPAGGFALPGLPSRPAARNQEEEEEAEVAPSIPSRNYEEREPLPVRVAMPVPRSAAPEIESAAESLPSRPIPVPPEVPKEEELPADSETHNPRAAAAAVAGVTAAAAAGAAVAHAADDTAPSKADATSGGKRALVQYDYEKAEDNEIELREGEYVTNIEMVHDDWWMGTNSRGESGLFPSNYVEIIDEEEGAAAAQPAAPAPAAPAPAAQQEEPPAATSGPTATAQFDYEAAEDNGTQSLGYPCVEHDIKWAALTYYVAELSFPEGALITDLDFPSEDWWFGHYNGASGLFPANYVQLNS

SEQ ID NO: 3426 - DNA, 1776 bp, Myceliophthora thermophilia
atggtccccccagcggtggcccgcctttcgagggcgtggttcccgagcggcggaattgccgcttctgcgtccgaagatgcccactcaaagctggtccgggctggcttcctacgccagtcgaatgccggcatgttccacatgctcccattggggcgccgggtgcaagataaagtcgagagcctgattgccagccacatggagcaatcactagcggacacgccccgcttacgcgtcttaatcccatggccgacagcggcgtctagagtctccctgtcctcgatatcagccgagtcactatgggagaaaagcggtcgcctggacaaggtcgcatcagagctcttcagattttctgatcgcagggatatagcctacctcctcgccccaacgcacgaggaggagatcacatccctggtagctcgctcggttcggtcgtataaggagctccctctgcggttgtatcagatcacacgcaaataccgggatgagtttcgcccacgccacggcctcctccgtggacgagaattcgtcatgaaggacctatacactttcgacaacaccgttgagttagcccttgaaacgtatcacaaggttcgttccgtctacagccagtttttttcggacatgaagctgcctgttctggcggccaaagccagttctggcgatatgggaggtgacctgagtcacgagtatcacctccccacgccgctcggtgaagatcacgtcatcagttgcaacaactgcgactacgtggtaaacgaggaaatagccgatgcagctgtttctagcgaggtcgccgcggacagctcgtttgaaacctggcgaggcatcaccaaggacagaactaaactcgtgaacgtttggtaccccaggtggatccaactacccggcggcggagagctgcgggagatgacgtatcgagacatcaacatgtccgcggtgaaatccgtcgtgccggacctcgacacggcagtagaagatgccctgcctttctggtcggccgccattgcccctcagacgagaacggctactgaggtaatcaacgtcattgacagtcgtctcccatcgtcgctggccgatggcctgagtggcccttcacccactatttcaagctggccggcaacactgagtcctccatcaatgccgctgcctgtttcttcctgtcgtggggtgcgcagcggcagcggcagcgtctcgcttaacattttgcgcgtccgtaccggcgataggtgtcctcagtgttcatccgggagcctaaaggtggaaagagcaatggagctaggtcacgcttttttcctcggcacgagatactcggagccattgggagccatgacaaccatgccccctgctggacaaccttcgcctatgcagatggggtgtttcggaatcggtatttctcgtgtgatgggcgcggctgccgaatacctggccgacagaacgggtttaaattggccattagccatagcgccgtattcatgcgtcgtgataccgggcaaagacgcaagcgacagtgatgccacgcaagtgtatcaccagataaatggactttccggttccgctaggcgttttttggaccccgtgcttgacgaccgccaaaaacctctgccatggaagcttactgatgcagaccttattgggtttccggtgattgtagtactcgggagggagtgggaaagggctaagagagtcgaggtacagtgccgaaggctaggagtgaaacaaatcgttgacgtcaccgacttagcagttattatagaaaagctacatatgacattataa

SEQ ID NO: 3427 - protein, 591 aa, Myceliophthora thermophilia
MVPPAVARLSRAWFPSGGIAASASEDAHSKLVRAGFLRQSNAGMFHMLPLGRRVQDKVESLIASHMEQSLADTPRLRVLIPWPTAASRVSLSSISAESLWEKSGRLDKVASELFRFSDRRDIAYLLAPTHEEEITSLVARSVRSYKELPLRLYQITRKYRDEFRPRHGLLRGREFVMKDLYTFDNTVELALETYHKVRSVYSQFFSDMKLPVLAAKASSGDMGGDLSHEYHLPTPLGEDHVISCNNCDYVVNEEIADAAVSSEVAADSSFETWRGITKDRTKLVNVWYPRWIQLPGGGELREMTYRDINMSAVKSVVPDLDTAVEDALPFWSAAIAPQTRTATEVINVIDSRLPSSLADGLSGPSPTISSWPATLSPPSMPLPVSSCRGVRSGSGSVSLNILRVRTGDRCPQCSSGSLKVERAMELGHAFFLGTRYSEPLGAMTTMPPAGQPSPMQMGCFGIGISRVMGAAAEYLADRTGLNWPLAIAPYSCVVIPGKDASDSDATQVYHQINGLSGSARRFLDPVLDDRQKPLPWKLTDADLIGFPVIVVLGREWERAKRVEVQCRRLGVKQIVDVTDLAVIIEKLHMTL

SEQ ID NO: 3428 - DNA, 1983 bp, Myceliophthora thermophilia
atgccagacaaggcactcagggtcgttacctacgccgctggtgcctccctagcagcaatcacgctcatttacgtgttcgggccgacgtactttctcgacggcgatacctcgaggtccggtaccggcgcattctcgacgcgaaaggcaggcgttgttggtctttcgaatcctgccaacgattgtttcatcaactcggttctccaggcactcgctggattaggcgacctccgactctatctaatacgcgaagttcaccgtcgaagactcgatgacgaaaccgtctacacgcagttggtcccggccgacgcgctggctcagctggaagtcgagactggattaaggcgctttggcaaggatataccgggctggaagttggaagggttacaaagaggcgtcatcaccaagagcctcaaagatatcctcgacgcgttaaacgagcgcccgattcacaaaaagacgatatccgctgcaccttttgtaagggctctggaggaggctttccggcaacgcatcagccggcagcagcaagatgcccatgaatttctgcagatagtggccgagaggctctgcgatgagtatcatgcaggatgtagcgcacgatggctctccaggcgcactgcggccctggatgaaaagaaactcgcggaggcgcaacaggcaactcaggttcctagcgcggaattgccccagtcgcatcggcctttgggccagacaaacaccgctgctctcaaccaggcagccgaggcgtcgacaggcggcgcagggcagaatcgtggctatgtggaacatcaaggtatggaagaggaggaaggtttccctttagagggcaagtttgaatcacaaatcgaatgcctaacttgtggtttcaaaccacgacctacaccctcgactttctgtacccttactctccatgtgcctcgggttccgtcaacaaccctgagcgcgtgcttcgacggcatgttcaagacggagtacattgacgacttcaggtgcgagaaatgccggcttctacatgcgctgtccatcttcgaggtcgccgctcggcgagcttcctcggaggagaagagactgaaggctcagtcagcggcggaaaagcttcggctcgccatcgagaaagaccccgagactcccccagcgggcgtggaacttcccgatttgcactctgcgccaaagcgcaggatcgctcgccacatccgcatcactcacttccccaaaatactggctattcatctgtccaggtccatctttgatgctagccgctcgtcgcagaagaacttggccaaggttgcattcccagaaaagctcacgctgggcggcttgctccagcaacgaaggtacaagttgcttggcgtcgtgactcacaagggaagtcaccacagcggtcactacgagtcctttcgacgtcaaaacatctacccgccgttttccaatccaagtacgttccaggcttcgggggtctatagcaggacccccagccccgcctcgacgcctcgggccgacctccggggccaacctccgcaggacgtcgctgctcccacctcggcgggaaggcattccgactcggctcctccttgtcacctatccgcgacccctgcggcgggctctcgcgactcgctgtgtgatagcacgcgcggcggagaaagttccgcagacgctcggagcggtgccacaccggttgcggcggcgcaagccagcaattcggacagcggtagccgggatccgaccgaaacaacgccgcagttgagcatcccaggggctggctctccaccgccacgctccgggacaccgggtgctcaatccgtcaaggagcatcgactatcgactcactccgcgccagcggcaaggacgaagcagcggaagcaacagagtcgttggtggcgaattagtgacgacaagatcaaagaagccaatacccgtgacgtcctagggatgcagcgggaggtgtacctaatgttctacgaactcgaacgaccctatctgtag

SEQ ID NO: 3429 - protein, 660 aa, Myceliophthora thermophilia
MPDKALRVVTYAAGASLAAITLIYVFGPTYFLDGDTSRSGTGAFSTRKAGVVGLSNPANDCFINSVLQALAGLGDLRLYLIREVHRRRLDDETVYTQLVPADALAQLEVETGLRRFGKDIPGWKLEGLQRGVITKSLKDILDALNERPIHKKTISAAPFVRALEEAFRQRISRQQQDAHEFLQIVAERLCDEYHAGCSARWLSRRTAALDEKKLAEAQQATQVPSAELPQSHRPLGQTNTAALNQAAEASTGGAGQNRGYVEHQGMEEEEGFPLEGKFESQIECLTCGFKPRPTPSTFCTLTLHVPRVPSTTLSACFDGMFKTEYIDDFRCEKCRLLHALSIFEVAARRASSEEKRLKAQSAAEKLRLAIEKDPETPPAGVELPDLHSAPKRRIARHIRITHFPKILAIHLSRSIFDASRSSQKNLAKVAFPEKLTLGGLLQQRRYKLLGVVTHKGSHHSGHYESFRRQNIYPPFSNPSTFQASGVYSRTPSPASTPRADLRGQPPQDVAAPTSAGRHSDSAPPCHLSATPAAGSRDSLCDSTRGGESSADARSGATPVAAAQASNSDSGSRDPTETTPQLSIPGAGSPPPRSGTPGAQSVKEHRLSTHSAPAARTKQRKQQSRWWRISDDKIKEANTRDVLGMQREVYLMFYELERPYL

SEQ ID NO: 3430 - DNA, 1842 bp, Myceliophthora thermophilia
atgtctgagcccgactcggcatcagggatgccaaccgcagagccgccatcaaaacggcgcagggtgcacgacgacagtctcgaatccacgccgcgatatggatcggccgccgcgggcggcgcacaccaaacctccccgcgcaccgccggccgcctttccgaccagagcctctccatccggcgcggcccgccaagcagccgctcgcgtagccgttcgcgtagtagggacagagacggaagcgctacggtaccgctcatcgccctcgcgatcccgctcgaggtctcgctcgaggtctcgctcgagatcacgctcgcggtcgactgcccgttcctcccgatcgcgttccagactccgttcccgctcccgctcccggagcatctcctatacccgctcgcgctccgattcccgcagtcagagtcgctccatctcgcggagtcggagccgcagcagaagcagaaatccgatgaccgccaccaccaccaccaccattaccactaccatcgccgccggcgtcatgagcaaccgcccatcacccccaattactacccacacctgctcctcctgggccatagccgcgccgtcgcccaggtgcgcatctcccccgatggccgctggatcgcctcggcctcggccgacgggacggccaagatctgggacgcctcaaccggcgcccacctcgagactctcgtcggccacatggcgggcgtctcctgcctcgcctgggcgcccgacagcaacaccctggccacggggtccgacgacaagtcgatccggctgtgggaccgcgtgacgggcagccccgcgcatgccgtcgcgcaccgggagaccgcggccgtagacggcatgggcggcgccgacgtggcggcgtcgtcccgggggccggccggccgcggcgcggcgaggagggccgcgcgcacgggcgtctcgcccgacggcgtccggggcggcaggacggggaagggaccgctgctgggccaccacaactacgtctactgtctcgccttctcgcccaagggcaacatcctggcgagcgggagctacgacgaggcggtcttcttgtgggacgtcagggccggcaggctgatgcgcagcttgccggcgcatagcgacccggtaagcggcgtcgacttttgcagagacggcacgttggtggtgagctgttcgacggatgggttgatccgcatttgggatacctataccggccagtgcctgcgtacactggtacacgaggacaaccccgccgtcaccaacgtctgcttcagcccaaacggccgcttcgtgctggccttcagcctcgacagctccatccggttgtgggactacgtctcggggtctgtgaagaagacataccagggccatacgaaccagaagtactcgatcggaggctgtttcggcgtgcttactgaccgcgacgacgacttggctgcggaggacaacgcagacggcgagcatgtccggcagcaggccttcatcacatctgcgagcgaggacggcgacatcgtcatgtgggacgtaaaaagcaaagaggtgttacagcgcatcaaggccgcgcacaagggagtgtgtttctgggtggacgtccacggcggcacaatggtcagcgccggccaggacggatcgatcaaggtgttccggcaccgcccgaggagggggggacatgtcaaacgggaggatggcgattccgacaggtacggcgccgtcaatgggcatctcctggacggggagatgccggatgcggccgcggcggatgaggagctgcaacggcaggtcgaggccgaggccgaggctgcggcggcggcggcggtgtcgccgggacaacacgtcaaggaggaacagttgtaa

SEQ ID NO: 3431 - protein, 613 aa, Myceliophthora thermophilia
MSEPDSASGMPTAEPPSKRRRVHDDSLESTPRYGSAAAGGAHQTSPRTAGRLSDQSLSIRRGPPSSRSRSRSRSRDRDGSATVPLIALAIPLEVSLEVSLEITLAVDCPFLPIAFQTPFPLPLPEHLLYPLALRFPQSESLHLAESEPQQKQKSDDRHHHHHHYHYHRRRRHEQPPITPNYYPHLLLLGHSRAVAQVRISPDGRWIASASADGTAKIWDASTGAHLETLVGHMAGVSCLAWAPDSNTLATGSDDKSIRLWDRVTGSPAHAVAHRETAAVDGMGGADVAASSRGPAGRGAARRAARTGVSPDGVRGGRTGKGPLLGHHNYVYCLAFSPKGNILASGSYDEAVFLWDVRAGRLMRSLPAHSDPVSGVDFCRDGTLVVSCSTDGLIRIWDTYTGQCLRTLVHEDNPAVTNVCFSPNGRFVLAFSLDSSIRLWDYVSGSVKKTYQGHTNQKYSIGGCFGVLTDRDDDLAAEDNADGEHVRQQAFITSASEDGDIVMWDVKSKEVLQRIKAAHKGVCFWVDVHGGTMVSAGQDGSIKVFRHRPRRGGHVKREDGDSDRYGAVNGHLLDGEMPDAAAADEELQRQVEAEAEAAAAAAVSPGQHVKEEQL

SEQ ID NO: 3432 - DNA, 1407 bp, Myceliophthora thermophilia
atgcccgacgattccattcgacctcttatccactctcgctcggtttctcctgcaccgaccttcggagcccacaacaatatgaacaatctggatgtcgccgggggaagtttgcgaaggaaggagcggacttcatgggtagtgacgatttcgtatgtcttcgactgggtcgtgctcgctatcttcgccgcagtcggctacgttttggggaagatcactccgaacaaacggccgttttctctggatgaccgcaatatcgctttcccttacacggtcgaggagactgtcccagtctggctgctggtaatcattgccatcatcgctccgatctgtctcatcgctgttatctgcctcatattcgtccccggtgcgacagtccccgtcgggacgccaaagtcgctgatctggaagcgcaagctatgggagctacacaccggcctgctgggtctcgccttgtcgatagtcgcggcttggtttatcaccaacggcatgaaaaatctgtttggaaagccacggcccgatctcctgtccagatgccaacccgaccttgataatctccccaactatgtcatcggcggcacgaaggggttaccaatggcgacagcggctgggcagctcgtgagccccagcatttgtaagaatccagacaagcatatgctggatgatggtttcaggagttacccgagcgggcattcaagttcttcagctgcaggtctgatttacttttccctcttcatcgcgagcaagttcgccattacaattccgttcctcgccccggccggcttcgccgacgcgtccgcctttaccgctttcccctcgcgcacacgcctgccaaacatcagagtttccggccccaattcatacgagctacctgaccgtaaccgcggcgcgccgtcggcatcgacgctggacacagccttgggtaacaagggtatttcgcggcacaaccagacaatctcagcagtgcgtcgtcaagcggccgcgccacctatctaccttctctgcatcgcggtcgttcccttcttcgcttccgttttcatcgccggctcgcggtggtgggattttcggcaccacggtttcgacatcatatttggttacctcatcggaaccgtcactgctatcttttccttccgctactatcatctgcccatctccagcggtgctggatgggcgtggggacctcgcagccgcgataaggcgttttgggctggtgtgggaagcttcagctacgcaacggaccatttgcgagggacgtaccgatccggcgacgaagaggaagccctgccgagtgctgatccatatggccgtggcagtgcgctgaacggcaccacggatcatgctccatcctcacgcaaggctgcgggtccggaggggagagatgtcgaatatgctggcgattcgaggatctaa

SEQ ID NO: 3433 - protein, 468 aa, Myceliophthora thermophilia
MPDDSIRPLIHSRSVSPAPTFGAHNNMNNLDVAGGSLRRKERTSWVVTISYVFDWVVLAIFAAVGYVLGKITPNKRPFSLDDRNIAFPYTVEETVPVWLLVIIAIIAPICLIAVICLIFVPGATVPVGTPKSLIWKRKLWELHTGLLGLALSIVAAWFITNGMKNLFGKPRPDLLSRCQPDLDNLPNYVIGGTKGLPMATAAGQLVSPSICKNPDKHMLDDGFRSYPSGHSSSSAAGLIYFSLFIASKFAITIPFLAPAGFADASAFTAFPSRTRLPNIRVSGPNSYELPDRNRGAPSASTLDTALGNKGISRHNQTISAVRRQAAAPPIYLLCIAVVPFFASVFIAGSRWWDFRHHGFDIIFGYLIGTVTAIFSFRYYHLPISSGAGWAWGPRSRDKAFWAGVGSFSYATDHLRGTYRSGDEEEALPSADPYGRGSALNGTTDHAPSSRKAAGPEGRDVEYAGDSRI

SEQ ID NO: 3434 - DNA, 2688 bp, Myceliophthora thermophilia
atggcgctcccggtccttcccaacaaggacaactttctcggtgtcgccctcgtcatcaaccgttctcgcgatggcccccgattcgtcttccactaccctcctcgcatctcgccctcggaggcttcaaagagggatgccgacgccgccgacgatgtcgacgaggacgacgacatcatccccggccgcccctcgctcgagccacacttcgagatgggctcttcatccgccgcgcttgctgccgagctcgctcagtggaaccacgatgaccacctcatcaccgaaagcggcacgcagattgtgccctgggagcacgttgccggcttccccaccaaggacctggagaacattctgacaccggcccgggcgtaccacaagcgcctcttccaggtctctctggaccccatctactgcgtctcgtgcccgatccaggtgcccgagaacggcgtgtggaggaagaagaaggacaagaagcccccgaagcaacggcagccacaccgggaccccgagaccgtcaggaatgaagacgaggaccagctcccgcccgacgctggcgagcggtacccgagtgacgctgagaagaccgaggcaaaagatccacccaagcccccggcccggccgacagaggaggccgaggacaagaagagctccatgaccatgttcaacctggtcttcttcctcaacccaaaaaagcacgaggccaagcccttgatcgacatcatgtttacgcacatcatcaagaagatcaacaaggcctacaagtactgccagcagcggagcgactttgtgtggaaagagtccaagaagatcctcgccctcaaagagaagggccgcgaagacagcaaagcggaagatgagctcgctgacctctacgaggcggtctctcagaacagaattgccgccctgcagctggacacggccgagggcaccgtgacgcactcggtccagattccggtcccgttccacgtgtccgatctgccccccgagggccatgacagtcagaggggcctctggctcacgactgcaaactcactgatggccgaggaggcggctgagacgccgggcttcctggacaagaactttgccctgctgctcatgatggacgagaagagggtgatagcggagttgcagacggacccggacgagaccacgctcgcgatgatcgagtttgtgcgccactgcaagccaacgctatccttctaccaggtctgccaacaatccagcaacattctcacgcccaaccaggtgcgcaagttcgcccagcactttattttctggcggcgtgccatcgccatcccaccgctacatgctcgcgatatgtacatcgtcagccctaactgcgacttgcgcaagctgccacaagcagccgcccaatgggctcgccagttccctctctccccgagcctcccgaatttcctcgctgaacttagcgtcgcgccacggccttataagctacactgccccagcaaagcccaccgcccggtgtatatggccatgctggcctggttgatgcgcgggggctgggttacccagttgtgcacctttgcttacgtcgtcgtctggcccgagatcatctacgaggtcgagtacgccttggaagccgaagagattgctcgcgcgaagcgcgcgcaggccatgggccgcgaaccaggcagccttgagagcgacgataccaccacaacaacaacgacggccgccaccatgtccgcagtcccctccccgggcgcgacagcccccgacgaccaagccatggccggatccgcctcgggctttctccccctcctgtccgacctcacagatcctacccgttccaccacggccagcctgtctcactcccaatcctccctcatccccaccgcgtcaacgcccgtctctccggcctacacgcgaaccaacgcggtcaccagtagccactcaccatccccgccaccaccaacaccaccaccacctcctcccccccacgatgacaatgacaacgactaccgtcacgaccgcgaccaccaacacgacgacaacggcaacaacgaaccaaccccagcagagcaagccgccgagaaagcccgcctcgcccgccttgccgaccgcaccgcgcgccagctagccgagcgcgccaccgcccacgcgcgaaaagcggtcccgcaggccacagagcaccccagcgtcaaccacgctccccaccttgagggcataactccccatatcattctcgacgccaagaaagcgacgggcaaggagagtctgtatctcagcgcgatcgagcgccggttccgggacaaggcccggaagaaccggggggtggggaagagcgatggcgcgttcggggacgccgggcttcgccaaggcgggagcgataggagccatgatgataggaattgggaaagggatcccgcgctgaagggaaaagaggataagggaggaagggacgcagcggcgacgacggcacctggcgccaggggaacgaaccggtttggaatgcctcctagtagcgccgccgccactactagcagcagcattcgggacacgggagactgggacgagcgggtggctaacgcgtggcctgtgatgtgcaagtacttcaacgggcggtcagcgctggagcggatcgcactgcaggaggacatgaagcggaaagatgtgtggaacctgttgacggctatgagcgagtacctgctgtgcgtccgccactggtga

SEQ ID NO: 3435 - protein, 895 aa, Myceliophthora thermophilia
MALPVLPNKDNFLGVALVINRSRDGPRFVFHYPPRISPSEASKRDADAADDVDEDDDIIPGRPSLEPHFEMGSSSAALAAELAQWNHDDHLITESGTQIVPWEHVAGFPTKDLENILTPARAYHKRLFQVSLDPIYCVSCPIQVPENGVWRKKKDKKPPKQRQPHRDPETVRNEDEDQLPPDAGERYPSDAEKTEAKDPPKPPARPTEEAEDKKSSMTMFNLVFFLNPKKHEAKPLIDIMFTHIIKKINKAYKYCQQRSDFVWKESKKILALKEKGREDSKAEDELADLYEAVSQNRIAALQLDTAEGTVTHSVQIPVPFHVSDLPPEGHDSQRGLWLTTANSLMAEEAAETPGFLDKNFALLLMMDEKRVIAELQTDPDETTLAMIEFVRHCKPTLSFYQVCQQSSNILTPNQVRKFAQHFIFWRRAIAIPPLHARDMYIVSPNCDLRKLPQAAAQWARQFPLSPSLPNFLAELSVAPRPYKLHCPSKAHRPVYMAMLAWLMRGGWVTQLCTFAYVVVWPEIIYEVEYALEAEEIARAKRAQAMGREPGSLESDDTTTTTTTAATMSAVPSPGATAPDDQAMAGSASGFLPLLSDLTDPTRSTTASLSHSQSSLIPTASTPVSPAYTRTNAVTSSHSPSPPPPTPPPPPPPHDDNDNDYRHDRDHQHDDNGNNEPTPAEQAAEKARLARLADRTARQLAERATAHARKAVPQATEHPSVNHAPHLEGITPHIILDAKKATGKESLYLSAIERRFRDKARKNRGVGKSDGAFGDAGLRQGGSDRSHDDRNWERDPALKGKEDKGGRDAAATTAPGARGTNRFGMPPSSAAATTSSSIRDTGDWDERVANAWPVMCKYFNGRSALERIALQEDMKRKDVWNLLTAMSEYLLCVRHW

SEQ ID NO: 3436 - DNA, 1974 bp, Myceliophthora thermophilia
atggaaatcctgcgatcacgtcgctttgagaaggcatctcgagcgcaccacgattgccacggccatggagaccgcacgcgaaataacgacaagggcttgaaaaataggccacagcagatcttgaagtccagcaagccccttgaaggtctgggcgagtggccagttccacgttcgaaagcagagaatgatgagttcgtgcaagcatggctgcaacagacaggggctagtcatcacaagcccctgggaacaggccacgagagaggccacaaacccgagcactcgaagaaccagcacagaaggcacaagagagaacaactcatgttagcagaacaatctcggtcaagcactcgtggaggcagacgcaggaagagatcgaggtcaatgtcggaaccccctgcttcatcctcgaaggcaaccgagcatgcgagatacggattcgagaagagaaagcgttatacgatcggagatgacaaatgtggccacaacgtttgggaagggcatagacaaatctcggacgaggggtctcggaaacatataccacaagaggtcgctggggggggagaccggactagtctgcaacaggccatttgcttccacggggtaaacgcacccgctcagcaacaaggcacgggaagcaaccaagttccgagaaagggtcgttttcacaagagcctgacccgaaggtcctcggacactcctgtcactaaatcaaggctcgacaggagccgaaaagaagacaaagagctcgaggagctttctgtgttcttctctcgagggacgtgcggcaaggaaacccggggtgagcgacgaggatttgcgagtcatgaaagggaacatcacggtgtgtcgcgcggcttgaagctgcatttcctacgcacccagcatgaacgctgcaggtcgttccttagttcgcaaccgtcgtacagcaccattaccattagccaaggagaagaggtaccccgatattccaggtccctgccagaagttcgaagccacgactcgggagaaacgcctcatgacagctcgagcgagaaagctagaggtggttcagcatggtcaaaacagtatgtcggtcaggccgtaggtcttggccctgaagcctcctgttccaggagggcgagctccagccacggcgcagcaaccttctctggggccagatctgatcgggttgtcgaagccgaagcaaactctccacccgagaaagttcaaaatatcagagaaagaagccgcaaagatgctgcagcccaaaccgaatcgactcctaaagaagcagagagacactcaatgcaatctcggaggcttgacgatcatggaatggtggaagatcaaacgaccaatcgggggtatcgcgtgcaagaagcatcaccgctcccgatcatcagaagcagagagaactggtcagcaccggaatggcgtcaaaatgcgctcagccttgagagaggttctggattctctctgccggatgaaagggaaattccgaacaggggattcctcttgcaatcgccgggcttatcaacagaatatcaaggctctactcgtcaaagcctggccctcgcaggccaccaccagatcgatgattacgttgacgctccaggaaaccttgggcccgagaatctggaggagttcatacgaaggatagaacaggaagccgcgacgatttctgaacaggccgcagagcactgtgtaccatttcgctccgaattcgacatgcctagccatttggaccgaaggccacgtgccccttcaagagccgccaacctcgatgagcccaatgatgccgcatttctgcccgataaagattggctttctctggagccggacatgttgactcttggatcgggtggtcacccagattactgccctggagccctctcgtctaggcccaagacaggttcattatggggctcgtcccttagggaagagcaggaagagtatccatcgacggcgtggcgcgtaggcagaaggttatattag

SEQ ID NO: 3437 - protein, 657 aa, Myceliophthora thermophilia
MEILRSRRFEKASRAHHDCHGHGDRTRNNDKGLKNRPQQILKSSKPLEGLGEWPVPRSKAENDEFVQAWLQQTGASHHKPLGTGHERGHKPEHSKNQHRRHKREQLMLAEQSRSSTRGGRRRKRSRSMSEPPASSSKATEHARYGFEKRKRYTIGDDKCGHNVWEGHRQISDEGSRKHIPQEVAGGGDRTSLQQAICFHGVNAPAQQQGTGSNQVPRKGRFHKSLTRRSSDTPVTKSRLDRSRKEDKELEELSVFFSRGTCGKETRGERRGFASHEREHHGVSRGLKLHFLRTQHERCRSFLSSQPSYSTITISQGEEVPRYSRSLPEVRSHDSGETPHDSSSEKARGGSAWSKQYVGQAVGLGPEASCSRRASSSHGAATFSGARSDRVVEAEANSPPEKVQNIRERSRKDAAAQTESTPKEAERHSMQSRRLDDHGMVEDQTTNRGYRVQEASPLPIIRSRENWSAPEWRQNALSLERGSGFSLPDEREIPNRGFLLQSPGLSTEYQGSTRQSLALAGHHQIDDYVDAPGNLGPENLEEFIRRIEQEAATISEQAAEHCVPFRSEFDMPSHLDRRPRAPSRAANLDEPNDAAFLPDKDWLSLEPDMLTLGSGGHPDYCPGALSSRPKTGSLWGSSLREEQEEYPSTAWRVGRRLY

SEQ ID NO: 3438 - DNA, 660 bp, Myceliophthora thermophilia
atggcgactcgaggaccccccggcgctcgcggcatgagcaaccgctttgcccacttcaagctggtgttgctaggtgaatcggccgtcgggaagagctcgatcgtgctgcggttcgtcaaggatcaattcgactcgtacagggaatccactatcggcgccgccttcctcacgcaaaccatctcgctggatgagaacacgacggtcaagttcgagatctgggatacggcgggccaggaacggtacaagtcgctggccccgatgtactacaggaatgccaactgcgcagtcgtcgtttacgacatcacccaggcgacatccctcgacaaggccaaatcgtgggttaaagagctccagcggcaggccaacgagaacatcatcatcgccctcgccgggaacaagctggacctggtgacggagcagcccgacaagcgggcgatcgagacggccgacgccgaggcgtatgcaagggaggctggccttctgttctttgagacgtcggcaaagacggccgagaatgtgcaggagttgttcaccgccatcgccaagaagttgccgctcgaccaggtcgggcccaggcatgcccggccaggccagcgacccggtgtcagcctagcgcccgagggggcaaacacgcaggttggcgggccgtgcgcttgctga

SEQ ID NO: 3439 - protein, 219 aa, Myceliophthora thermophilia
MATRGPPGARGMSNRFAHFKLVLLGESAVGKSSIVLRFVKDQFDSYRESTIGAAFLTQTISLDENTTVKFEIWDTAGQERYKSLAPMYYRNANCAVVVYDITQATSLDKAKSWVKELQRQANENIIIALAGNKLDLVTEQPDKRAIETADAEAYAREAGLLFFETSAKTAENVQELFTAIAKKLPLDQVGPRHARPGQRPGVSLAPEGANTQVGGPCAC

SEQ ID NO: 3440 - DNA, 906 bp, Myceliophthora thermophilia
atgctgtcggcaattgggcgcgcggccgctcggcatgcctgcgtcggcaccaacctgccaattcgcggcgcgagccggcataccgcgcagctgacttcccggaccacggtcgtcgttccgagcggctcccgcatcgcggcacggttcgcaagaggtttcgccgccgaagccggttctaccaggacgaagaccgcgaccaaggcgacaaccaagacgcccgctgctgctaagaagtccgcaaaggcggccgcgaaggccaaagccacggccgaaaagaagaagcccggtcctccgaaaaagccgctgacggacgaggaaaagaccaagaagaagatcaaggaattgaagaagacggcactcgccggcaaggagccggacaagcttcctatcacgccatggctggtctatctcaaagagaggatgcacgacgtgatgggccgggacacgaagcccacattcctagacgctgtgcacgagctctcgagcgattacaaggctctgcctgagtcagagaaggagagactcgcggccgaaggccggaagaataaggtcaccaacgacgtgaatttcaggaactgggtcgacagccacacggcgcaggagatccgggaggcgaacctggcccgccaactcctcaggcgaaagtattcgatccaggttgggcctactattcgggaccctcgcttcccgaaaccggccctgaatggttatgccgcttacgtcaagtcgcgctaccatgcgcccgagtatgacggagtcaagcccagtgagaggctcgttaggatcggcgaggaatggaagacgttgagcccggaacagcgcaagcccttcagcgatattagggaaacagacctccagagacacaagaaggagatggaggcgtaccgggaatccgcgaagctctga

SEQ ID NO: 3441 - protein, 301 aa, Myceliophthora thermophilia
MLSAIGRAAARHACVGTNLPIRGASRHTAQLTSRTTVVVPSGSRIAARFARGFAAEAGSTRTKTATKATTKTPAAAKKSAKAAAKAKATAEKKKPGPPKKPLTDEEKTKKKIKELKKTALAGKEPDKLPITPWLVYLKERMHDVMGRDTKPTFLDAVHELSSDYKALPESEKERLAAEGRKNKVTNDVNFRNWVDSHTAQEIREANLARQLLRRKYSIQVGPTIRDPRFPKPALNGYAAYVKSRYHAPEYDGVKPSERLVRIGEEWKTLSPEQRKPFSDIRETDLQRHKKEMEAYRESAKL

SEQ ID NO: 3442 - DNA, 1512 bp, Myceliophthora thermophilia
atgaaaaagttctggaaccggaccggggaggagaccaacccggggtcgagtccgggtcgggcgtcctcggaggacgcccggccggacgagcacacacgcctcctgccgaatcgcgtcgatagcaccccctacctctcgcccgacgaccctgccgtgtcgccgtacaatctctggaccgtccgtctcgtccgctggatcacggtcgcgctgacctgcgtcaccttcgcctggtgggtcctgatggtggtgacgatcttcatcacgccacccggcctccatgtccggggctcgcccttcttctccttcagctacgcttcgtttgcgcttctcaccctgatcgtctcgctgctgttcttctcggcgcccagcaagctggcgaggatcctcagcatcgtcaacgcggccgtgcttctcgtcgacgccaccctgatcctggtggttccagggctgcggcacgccgagatctgggtcggggtagccagcgtcctctgggcggcgctcatggcgctgtggttcgtcaccgtcgaccgcacggtgcagtggggcaaggccgaggaggaagaacgcctgaccggccgcccggagagcaggcgcacggtgacggagtggctggaggtcacgctctcaaccgtcctgctggccgtcctggcatgcgtcgtggtgctcatgacgctgaccctgatgctgcgcgcgatcgactccggcctggcgccacccggcaagcgatattgggtcgacaatgaccggtaccagatccatgtgtattgccgcggcaacaagaccgacgcggctggggccaagacgacgacggtcctcctcgaaggtggtgaggacccggtagagcgtggtttgtggcaattggccgagaacgcagtcaagaacgggtcgattagccggttctgcttcgccgaccgtccaggcatggcgtggagcgatgctgcgccgtcgcctttctctgccagcatcgcctcggacgccctgagtgaggcattacttcgagccggagaagagggcccctcgcgccatggcgacgacgttcgcggcatcctgatgatcgacccccttcatgaggatttactctcgcgagtcgggacccctgggcgcgggtttgccctctggatccgaggcgtcatttcacccggtggaatcgaccgcctcctgggtgctcttctcgggggtagacggtctgccgatcgagtttggggccgttcttcatatcagtcagggacgaccatcttcgccaaactccaagagagtctcgtggccgaatcgctcacgaagagagatgtggtatcgagccgggcgatccaaaatagagaaacaccactcgtattgatcagttcaggccaacaaatgaagaaggacaggagctgggaggaaaagcaacgcgatctcagccatctcacagcaaacctggtggactgggtggttatcgacgacgcaccgcatcggatatgggatgctttcagtgggagagatgccatcgagcgtaggttaaaggagcttgtttga

SEQ ID NO: 3443 - protein, 503 aa, Myceliophthora thermophilia
MKKFWNRTGEETNPGSSPGRASSEDARPDEHTRLLPNRVDSTPYLSPDDPAVSPYNLWTVRLVRWITVALTCVTFAWWVLMVVTIFITPPGLHVRGSPFFSFSYASFALLTLIVSLLFFSAPSKLARILSIVNAAVLLVDATLILVVPGLRHAEIWVGVASVLWAALMALWFVTVDRTVQWGKAEEEERLTGRPESRRTVTEWLEVTLSTVLLAVLACVVVLMTLTLMLRAIDSGLAPPGKRYWVDNDRYQIHVYCRGNKTDAAGAKTTTVLLEGGEDPVERGLWQLAENAVKNGSISRFCFADRPGMAWSDAAPSPFSASIASDALSEALLRAGEEGPSRHGDDVRGILMIDPLHEDLLSRVGTPGRGFALWIRGVISPGGIDRLLGALLGGRRSADRVWGRSSYQSGTTIFAKLQESLVAESLTKRDVVSSRAIQNRETPLVLISSGQQMKKDRSWEEKQRDLSHLTANLVDWVVIDDAPHRIWDAFSGRDAIERRLKELV

SEQ ID NO: 3444 - DNA, 1335 bp, Myceliophthora thermophilia
atggcggatcagtccatcttccgaatcaccaaggagttaagcgaccttcaaaagaactcggacctttcgctcgccgttgcttgccgcgacatcgacgttcggaatgtgaaagctctcattatcggaccgcacgacaccccctacgagttcgggtttttcgagtttgatttcaaattcaacaaagagtaccctcggaagtcgccacaagtcacggcgatcacgacgaacggtggtcggtcaaggttcaatcccaatatctacgccaatggcagggtgtgcctgacatggcgcggggagcggggagaggagtggtctgccgcacaaggcctggagtcaatccttttgtccatccagagtctgatgtccgcaaatccttacgagaatgagcccggctttgaagatgccaacgagccatccgaccaaaagcaccagaaggattacatccaaaaggtgattcgtcacgagacgctcaggatttccgtcatacaacggctcgaagaatatctcaaaatcggctccgacgggtcggttcaagcgcccgcatctgcgaagggcgagtatgatctcgacatggataccgttgaagacgagtcgagcgttccattcgagccgttcaaggatctgtgcaagcgcaggttcctgtggtactacgattcttaccttgcggccgtgcagaaaggcaagcaagaggtcaaggacggcgaatacttccagcggatgccctttgaaggctcgagcaacaccctggatggcaagttcaactacagcgaactggaacgacgcttgcacgcgataaaaaaggccctggacgaggagaccgagtcatgggcggcggagggactggtggcgaaggccaaggaaacaaccgttgcggttaacctccagcgccaattcgaacagattgtcgagcatttcaagcgctcaggcgccgcacacaatctggagcttgtggacggcaatccgttcgtctggatgttaacatatttcggaaagccgatgacaaacctggacggaggtcttttccgggcgaagctgtgcttcagtccccgattccccgaggagcagcctcgtgtcaaattcgagacgcgcctgttccaccaccggattgctgccgatggcacgccgtgctatgtggctcctgccagccgtcgggaggatgtcaaaacccatattgaagccatcattgatgcattggaggaggagcatcctccttacgaccccagaacgctggtacatcccgaggctttcaaactgtactggggctcacccgaggaccgacgcgtctacaaccgcaggctccgaagatcggtccagcaatcgatggaggacttctga

SEQ ID NO: 3445 - protein, 444 aa, Myceliophthora thermophilia
MADQSIFRITKELSDLQKNSDLSLAVACRDIDVRNVKALIIGPHDTPYEFGFFEFDFKFNKEYPRKSPQVTAITTNGGRSRFNPNIYANGRVCLTWRGERGEEWSAAQGLESILLSIQSLMSANPYENEPGFEDANEPSDQKHQKDYIQKVIRHETLRISVIQRLEEYLKIGSDGSVQAPASAKGEYDLDMDTVEDESSVPFEPFKDLCKRRFLWYYDSYLAAVQKGKQEVKDGEYFQRMPFEGSSNTLDGKFNYSELERRLHAIKKALDEETESWAAEGLVAKAKETTVAVNLQRQFEQIVEHFKRSGAAHNLELVDGNPFVWMLTYFGKPMTNLDGGLFRAKLCFSPRFPEEQPRVKFETRLFHHRIAADGTPCYVAPASRREDVKTHIEAIIDALEEEHPPYDPRTLVHPEAFKLYWGSPEDRRVYNRRLRRSVQQSMEDF

SEQ ID NO: 3446 - DNA, 3510 bp, Myceliophthora thermophilia
atgctgtcggccgtgtacaaggcgggccgcgctcctgccgtcctccgtcatggtcgccgcgtcccagtcacgtcctcgcagctgagcaccctggctgcgagctcgcagaacgtcctcttccgcacgcagactcagagccctagtgccaggttgagccaaaaacggcttctttccgcctccagggtcctggcgagcgccggggctgcgcaacccgccccggatcccaaggcctatctctcgagcggagtggtgaagcccaaggatatcatcgatgtcaagaaagtcctcgtcattggcagtggtggccttgccattggccaagctggagagttcgactactccggatcgcaagctctcaaggccctcaaggaggccggcgttgcctctgtcctcatcaaccccaacatcgcgaccatccagacgaaccacactcttgccgacgaggtctactaccttcccgtcaccccagagtacgtcgagtacgtgattcagagggaaaagcccgatggcatcttcctgtcctttggtggccagaccgccctcaacttgggtgtgcagatgcagaggatgggcctgttcgagaagtacggcgtcagggtccttggcaccagcgtcaggacactagagctcagtgaagaccgcgatctgtttgcgaaagcgctcgaggagatcaacatccctatcgccaagtccatcgccgtcaacacggtcgacgaggctctcgaagccgcctccaaggtcggataccccatcatcgttcgtgctgcctacgcgctcggcggtctggggtccggtttcgcaaacaacgaggaggagcttcgcaacatggctgcccggtcgctcaccctttcgcctcagatcttggtcgagaagtcgctcaagggctggaaggaagtcgagtatgaggtggtccgtgatgcgaacaacaactgcatcacggtgtgcaacatggagaactttgaccccttgggcatccacactggtgactcgatcgtcgttgcgcccagccagaccctgagcgacgaagagtatcacatgctccggtccgccgccatcaagatcgttcggcacctgggcgtcgttggcgagtgcaatgtccagtacgcgctgcagcccgatggcctcgattacagagtcatcgaggtcaacgctcgcctttcgcgttcctctgccttggcttccaaggcgaccgggtatcccttggcctacaccgcggccaagatcggtctgggccacagcctgcccgagctcccgaatgccgtgaccaagacgacgactgccaacttcgagccgtcgctcgattacatcgttaccaagattcccaggtgggatctgtccaaattccagcatgtgaagcgggacattggcagcgccatgaagtctgtgggcgaggtcatggctatcggccgtacctttgaggagtccttccaaaaggccatcaggcaggtcgaccccaggttcgtcggcttccagggcgagaagttcgcggacctcgattacgagctccagaaccccaccgaccgccgctggctggccgtcggtcaggccatgctccacgagaactactctgtcgaccgcgttcacgaactgaccaagatcgacaagtggttcctgtacaagttgcagaacattgtggactgcaccaaggagctgcagcagattggcaacctccgcgggctcaagaaggagcacatcctcaaggccaagaagatgggcttctcggacaagcagattgccctggctgtcaacagcaccgaggacgaggtccgtgctcgtaggttggagtttggcatccgcccgtgggtgaagaagattgataccctcgcggccgagttcccggccgacacgaactacctgtacaccacctacaacgcatcctctcacgatgtgaccttcgaggacaagggcaccgtgattctgggtagcggtgtctaccgtattggcagctctgtcgagttcgactggtgtgctgttagcgccactcaggctctgaggcagatgggtgagaagacggttatgatcaactacaaccccgagacgtacagcaccgatttcgatactgctgacaagctctacttcgaggagctgagctacgagcgtgtcatggatatctatgagctcgagaacgcaagcggtgtcgttgtctctgtcggcggccagctgcctcagaacatcgcactgcggctccaggagaccggcggtgccaaggtcctcggaacggatccccgcaacattgacaaggctgaggacaggcagaagttctccgagattctcgacagcattggcgttgaccagccggcgtggaaggagctcacctcggtcaaggctgccgaggagtttgccgaggaggttggctacccagtccttgttcgtcccagctacgtcctgtccggcgccgccatgacggtcattcgcagcaaggacgagctcaaggacaagctggaggcggctgccaacgtctcgcccgaccaccccgtggtcatcagcaagttcatcgagggtgccgaagagatcgacctggacggtgtcgcatcgcagggcaagctgatcgttcacgccatcagcgagcatgtcgaacaggccggtgtgcactccggcgatgccaccctggtccttccgcctgccaagctggaccagaagacgatggagcgcatcaaggagatagcccagaagattgcccaggccctggagatcaccggccctttcaacatgcagatcatcaaggtggatgatcccgcaggcggccccccggcgctgaaggtcattgagtgcaacctgcgcgcgtcgcggtccttccccttcgtcagcaaggtcctcggcaccaacttcatcgacgttgctaccaaggccctcgtcggcaagaacgtacctgagccgaccgacctgatggccgtcaagcgcgactacttggcgaccaaggtgccgcagttctcgtggactcgcctggctggtgctgatcccttcctcggcgtcgagatggcgtcgaccggtgagatggcctgcttcggcaaagatctggtcgaggcctactggtcttcgctccagtcggccatgaacttccgcgtccccgagccgggcgagggtatcctcttcggcggtgagctgagcaagccctggctcaccactgtcgtcgactacctcgctcctctcggctacaagctgtatgccgccgaccaggaggtcaagcagttcctcgagtcgacgagcaagcacaagatcaacgtcgacgtgattgagttcccgaccgaagataagcgtgccctccgcgaggtcttcaagaagtacgacatcaggggcgtcttcaacctggcccaggcccgtggcaagactatcatggacgtcgactacgtcatgcgccgcaacgccgtcgactttggtgtcccgctgtttatggaacctcagactgccatgctctttgctcagtgcatgagcgagaaactacctcgcccggagggtattccctccgaagtgcgcaggtggtctgagttcattggcggcaagcccttgtaa

SEQ ID NO: 3447 - protein, 1169 aa, Myceliophthora thermophilia
MLSAVYKAGRAPAVLRHGRRVPVTSSQLSTLAASSQNVLFRTQTQSPSARLSQKRLLSASRVLASAGAAQPAPDPKAYLSSGVVKPKDIIDVKKVLVIGSGGLAIGQAGEFDYSGSQALKALKEAGVASVLINPNIATIQTNHTLADEVYYLPVTPEYVEYVIQREKPDGIFLSFGGQTALNLGVQMQRMGLFEKYGVRVLGTSVRTLELSEDRDLFAKALEEINIPIAKSIAVNTVDEALEAASKVGYPIIVRAAYALGGLGSGFANNEEELRNMAARSLTLSPQILVEKSLKGWKEVEYEVVRDANNNCITVCNMENFDPLGIHTGDSIVVAPSQTLSDEEYHMLRSAAIKIVRHLGVVGECNVQYALQPDGLDYRVIEVNARLSRSSALASKATGYPLAYTAAKIGLGHSLPELPNAVTKTTTANFEPSLDYIVTKIPRWDLSKFQHVKRDIGSAMKSVGEVMAIGRTFEESFQKAIRQVDPRFVGFQGEKFADLDYELQNPTDRRWLAVGQAMLHENYSVDRVHELTKIDKWFLYKLQNIVDCTKELQQIGNLRGLKKEHILKAKKMGFSDKQIALAVNSTEDEVRARRLEFGIRPWVKKIDTLAAEFPADTNYLYTTYNASSHDVTFEDKGTVILGSGVYRIGSSVEFDWCAVSATQALRQMGEKTVMINYNPETYSTDFDTADKLYFEELSYERVMDIYELENASGVVVSVGGQLPQNIALRLQETGGAKVLGTDPRNIDKAEDRQKFSEILDSIGVDQPAWKELTSVKAAEEFAEEVGYPVLVRPSYVLSGAAMTVIRSKDELKDKLEAAANVSPDHPVVISKFIEGAEEIDLDGVASQGKLIVHAISEHVEQAGVHSGDATLVLPPAKLDQKTMERIKEIAQKIAQALEITGPFNMQIIKVDDPAGGPPALKVIECNLRASRSFPFVSKVLGTNFIDVATKALVGKNVPEPTDLMAVKRDYLATKVPQFSWTRLAGADPFLGVEMASTGEMACFGKDLVEAYWSSLQSAMNFRVPEPGEGILFGGELSKPWLTTVVDYLAPLGYKLYAADQEVKQFLESTSKHKINVDVIEFPTEDKRALREVFKKYDIRGVFNLAQARGKTIMDVDYVMRRNAVDFGVPLFMEPQTAMLFAQCMSEKLPRPEGIPSEVRRWSEFIGGKPL

SEQ ID NO: 3448 - DNA, 1164 bp, Myceliophthora thermophilia
atgagcccccttacgaaaaacaagcccccgaggccagaggaggaaaagaagaaggaggatgaagaagaagaggaagaagactacatgactatgaccttctccgacgacccccccggctccaccgcgggcgagacgtccctgcagcgccgccagcgcctccgccgcgaggccgaggcccgagcccgccccaagtccaaggccgagctcgccgccgaggcggaagcccgccgcgaggccgccctctcccggtcgctgctgaccgccaaccccaagagcaaggggctggccatgatggccaagatggggttcaagggcggtgcgctcggcaagcaacagccgccggtggcgcaaagctcggaaggaggaggcaatggtgctagtggcgatggcgatccggaagggaaacgggtcggcggcgcagaaggaagagatggggaaggagcagcagcagcagcaggagcaggagcaggaggaaggggtggggatggcccccgcatagagcccattcggatcgagatcaaggaaggccgcgagggcattgggctggagagcgaacggaagcggaagctcagagaggccgccgaggccgccggggagagggcgaagcgggccaaggaggacgaggccgggtaccgggagcggatgaggagggagcgagaagaggcccggtgggagcgccagttcgtcgccgcccaacgagttgccgagaggatggtcggggagagggaagacagagaagcaggggcggggaccacagggccggcaccggccccggccccggccccggcgtcgcgcccgctgaaggcgatccccgttgtctggcggggcctggtaaaggcgagggaggaggccgagagggaccgcaggatgaggcgcgatctcgagcagggcctggccaggctgccgacgtacgacgatgcagacgaggacgaggacgatcggaaggcgctgggcaagacggcgacggaggtcgtcattgcggaggatctggatgaggaggacgcggagctggacgagttcaatgccctgccaccggacgagcggctgcggagggtggtcgagtacctgcgcagggagtttcactactgcttctggtgcaaattcggataccctgatgagcagatggagggctgtcccggactgacggaggaggaccacgactag

SEQ ID NO: 3449 - protein, 387 aa, Myceliophthora thermophilia
MSPLTKNKPPRPEEEKKKEDEEEEEEDYMTMTFSDDPPGSTAGETSLQRRQRLRREAEARARPKSKAELAAEAEARREAALSRSLLTANPKSKGLAMMAKMGFKGGALGKQQPPVAQSSEGGGNGASGDGDPEGKRVGGAEGRDGEGAAAAAGAGAGGRGGDGPRIEPIRIEIKEGREGIGLESERKRKLREAAEAAGERAKRAKEDEAGYRERMRREREEARWERQFVAAQRVAERMVGEREDREAGAGTTGPAPAPAPAPASRPLKAIPVVWRGLVKAREEAERDRRMRRDLEQGLARLPTYDDADEDEDDRKALGKTATEVVIAEDLDEEDAELDEFNALPPDERLRRVVEYLRREFHYCFWCKFGYPDEQMEGCPGLTEEDHD

SEQ ID NO: 3450 - DNA, 879 bp, Myceliophthora thermophilia
atgagcaagtacggcgtgatggttatgggccccgcggggtcgaccttctgcgcaagcctcattacgcacctccagctaaaccgccgttctgcgttctacgtgaacctcgatcctgcggccgagcacttcgagcacccgccagacctcgacattaaagacctgatctcgctggaggatgtgatggacgagttgaaacttggccccaacggggggctgctctactgcttcgagttcttaatggagaacctggattttctttcagaagccctcgagtctctgacggaagaatatctcgtcatcttcgacatgccgggccagatcgaactctacacccatgtccccgtcgtcccaaccctgatcaagttcctcacgcaggcgggagccttggacatgcggttatgcgccgcgtaccttctcgatgccacgttcgtcatcgatcgcgcaaagtacttcgccgggtcgctcagcgcaatgagcgccatgatcatgttggagataccgcacctcaacatcctgagcaagatggacttgctcaaggaccagatgcggaaaaaggactttaagcggttcctcgtgccggatacgacgctactcgaggacgacccggcagatcgctcgcggagaaaagtcaaagtcgacgtccatagcgcagaccccacggacaaggacgccatcatgtctggcgcgaccttcaagcagctgaatgcggccgttgccaacctcattgagagcttcagcatggtcagctacctgaaactcgacagcaccgatgaagacagcgtgcaggcgattctcagctacatcgacgactgtatacagttccacgaggcacaggagcccaaagagctggctgacgaggaatacgatgaggacgaatga

SEQ ID NO: 3451 - protein, 292 aa, Myceliophthora thermophilia
MSKYGVMVMGPAGSTFCASLITHLQLNRRSAFYVNLDPAAEHFEHPPDLDIKDLISLEDVMDELKLGPNGGLLYCFEFLMENLDFLSEALESLTEEYLVIFDMPGQIELYTHVPVVPTLIKFLTQAGALDMRLCAAYLLDATFVIDRAKYFAGSLSAMSAMIMLEIPHLNILSKMDLLKDQMRKKDFKRFLVPDTTLLEDDPADRSRRKVKVDVHSADPTDKDAIMSGATFKQLNAAVANLIESFSMVSYLKLDSTDEDSVQAILSYIDDCIQFHEAQEPKELADEEYDEDE

SEQ ID NO: 3452 - DNA, 660 bp, Myceliophthora thermophilia
atgtatgtacgtccgtactctccagtccatcagggcccagctatacctttgcgggaatcgcttccggcaggtaggaactacatccgttggcgcgggcgatgcagagtggtcgagagcgccaggggtcgcccaacgcctccgctgcttttcggcaacccgccagctcgttccgtcgtccaggcaacacctccggcgtgctccgtcgtgtcccgcggacttcaagaggacagacggcttcgacggagagccgctaagctgggcctgcgcatctcaaatcctcccggtcggaagacaactgctgtgatgcaccccctgtgtggcggcgaccgaagccgtcgctggaaggcggcgtgggcggtgatcctatcccgctgcctgcttctcgatgctgtgccaaatccggaagctgcagacaggctaaaaagcccggaagtcgacaagcaaaaagcgtttaatttagcctggccgtatgactcgcttgttaataggattcttggcgcaccttcctccgaaaagcacccagaaaggcattcaacgtgccagcgtcggattgtcggtcgcggaccaaatttctccgacttcggtgccgtgttccaggcatggatgggtcttgggagaccaagaagttccatgggaacatcgtgcgtcagcgatctctag

SEQ ID NO: 3453 - protein, 219 aa, Myceliophthora thermophilia
MYVRPYSPVHQGPAIPLRESLPAGRNYIRWRGRCRVVESARGRPTPPLLFGNPPARSVVQATPPACSVVSRGLQEDRRLRRRAAKLGLRISNPPGRKTTAVMHPLCGGDRSRRWKAAWAVILSRCLLLDAVPNPEAADRLKSPEVDKQKAFNLAWPYDSLVNRILGAPSSEKHPERHSTCQRRIVGRGPNFSDFGAVFQAWMGLGRPRSSMGTSCVSDL

SEQ ID NO: 3454 - DNA, 1215 bp, Myceliophthora thermophilia
atggttcagaacggaggtgacctcgacctcgacatcgacatggctaccaacgagttggaccagagagataaggttgctcaggcccgaattaaggaactcgagaacggcgaaaagtactcgcagaaactggttaacgaggcttacgccaaaatcgaagcgctcgagactgccaaagcgagccacatcaagatcgaaccacctggcaaatacggaggaaccaaggaggatctcgcaggattcctgacaaaccttcgatcctactttcggctcaataacgacaagtttccagataacaaagccaaagttctctacgtagctacgagattggagggcaaggcacttagatggttcgaacctacgtggaacgactatctcactgaggaagacgaggacgaccaagacgcgttcacgcagcagtcttccgatcttacgaccgtttcgaagaagagctttagaagacaggacatgctcaagtctcagcttaacgacgaggcgttgatgcaactgttttacaacggcttgaaggaaaaggtcaaagacgagctatacaagtacgaccagcctgagaccctggacgaatacatcgcacaggccattaggatcgatgatcgactctacgcacgagagcagcagaaacgaggtcggatgaacggaaccgcggttaaggccaacgacaagaaaaagcgagcgtacgaaattgcggctatcgacgaaaccaccaaggacgtcatcgaagtagcggccacgagctacgaagacaggggcagcgacacggacagtctcggacatgacgacaatagagaagacgaacaagcaccgtactccgaactggtcactatggacccagagacaggtctcgccgaatgggacgtggcaggagaatatgcaccgccacaactcagccacgacgtacggaacccggaataccagttcatgcgcgcgaaccgcggaaaagacgaacccgaacaaccgaagaggttagcactgacctgggaaacgggtcagggcccttcgaggggcccggaaatcattaacgcccgcgcagcggcgagtggtagcgcagtacaggaggaactggcggagaccgaaccgatcgacatcactatagcagggaagaccacagcaatcgtattcagcatcgtggacatgggtaacgacaaagacatgatattagggttaccatggcatgaagattatgacccggacattagctag

SEQ ID NO: 3455 - protein, 404 aa, Myceliophthora thermophilia
MVQNGGDLDLDIDMATNELDQRDKVAQARIKELENGEKYSQKLVNEAYAKIEALETAKASHIKIEPPGKYGGTKEDLAGFLTNLRSYFRLNNDKFPDNKAKVLYVATRLEGKALRWFEPTWNDYLTEEDEDDQDAFTQQSSDLTTVSKKSFRRQDMLKSQLNDEALMQLFYNGLKEKVKDELYKYDQPETLDEYIAQAIRIDDRLYAREQQKRGRMNGTAVKANDKKKRAYEIAAIDETTKDVIEVAATSYEDRGSDTDSLGHDDNREDEQAPYSELVTMDPETGLAEWDVAGEYAPPQLSHDVRNPEYQFMRANRGKDEPEQPKRLALTWETGQGPSRGPEIINARAAASGSAVQEELAETEPIDITIAGKTTAIVFSIVDMGNDKDMILGLPWHEDYDPDIS

SEQ ID NO: 3456 - DNA, 258 bp, Myceliophthora thermophilia
atgctatccaaagtattcccagccgcggcaccgtccctggccaaccagcagcggccactgtgggagaaatgcgtgatcgcacacgtcccagccagggaacgggctgccgtgatgcgcgagtttcccataccagtcagcccagcggggcatggccgtcgtcgccggccccgcacgctcatgcactctctcactcccaagctaccgggggaggtgtccatcgtctgtgagtccatcctgaccgccgcagcaccgaattaa

SEQ ID NO: 3457 - protein, 85 aa, Myceliophthora thermophilia
MLSKVFPAAAPSLANQQRPLWEKCVIAHVPARERAAVMREFPIPVSPAGHGRRRRPRTLMHSLTPKLPGEVSIVCESILTAAAPN

SEQ ID NO: 3458 - DNA, 2088 bp, Myceliophthora thermophilia
atgacgcagagaggtcgctcgtctcgacacgaaggccatgggctccaaacacagagcaacaacgccatcccaatcccggcggactcaatggccaagaaccacaagccaccagccctgagccccgcggcggcagcacagaggcgtagctttcgggtccggccgctgagcggagaccgtccaagagggttgaaaggggaggagcgtgggggaaatggtctaacggacccagaggtgcccaaccaaatgcccgatgctgctactactaccacccgggttgatcttgtttacgatccctcgcaggcgagcagggacatgtcggtccgtctcgtgttggatgttgaggaagactgggagcacgagcttgaggagttttgccgtctgaaaaggctcggtctgatcaaagaggcgaaggagcacttttggtccagactcgggcatgtcagcaccataccctacatccgggtgcagtatgccgagatgctccagtcttgcggtgacttcaagagtcttcagtgtcttgactttcttcccgagtttcctcccgatccgtgggaagaaacgacggaggaccgcaaccggggaaaactagtcgccaaccataccctgttggatttcctgtcccaacggccgatttccgattacgttactgctgcatggtcgtttgtccgccagacgctgaaagctctcgccagtgagttggtagttggttcgacagagatccaaatgattgtactgtgcctccgcgtcttgggctacttgaagacttgcacgagcaaggccatcacgggaccagttcgcgtctacgcgaagcatttgttcgactggcgtcggctgtataacgacctcgtcggcgagagctgcgtttgggatttcaaggacctcttcctcgcttgcgtgtcggtctttggctggcccgagacgatagagcagttcttcggcaccacccacacccccctagcgctggatactatcatcaaggactggaacggtgaacctcttgacgaagcatctatgatgggccttctcgacctgttcacttcaccggttctccagagtcacatcggacggaaggcgcggaagacgctgctaatgcatcacgcaaaggcgctggcggattctgtagaacaaaacaagccggaactgatgaagaccaggcccttcatccaatggctgctggccaaaaccgcgcacgaattggaagcgcccccggaacggccggacggcgtgcgtatggaacactttggcggactgaaactggaccaaggggccggtatccatctaccgatatacgtccccaccaggcacagcagaaagcccgactgggacatgttcttctttcgatctacacccgctcagcgacgcgttgtcgagctcgccgttagaacggcggagcagatcggagactacgccctgcaagccgaggccatgaagctgctcatcctccagtctcaggacccctggcgcttgatgagtgctctggcaagcctgcaactggagacgcaaggcgataaggaaggctatctctcgacatgtttgtcgatgtatctggtggccacagacctgaccgcggaagcgaacctcttgagagacctcgaacggccctgccaggggggaaacatgctcttgtttgagcagtgcgagaatgcatctctgacctgggcttgggttatgatccggatcctgctcgcgtcgtcgatcaacggggatgcgggttcggacaccacgaccgacagcagcgaagagccctcgccgttcctggctcgccggcttcacctggacggaactagactggccccttacatcgccgagttcggccgcgccgagctcgggatcgacatttcgccgccgatggaaccgctctctgtagacgatcggatcgaggaacccgattactcagacgaccagcggatcgcggcgctccgtcgccgtttcgcccgcggagcctctgaagcgcgggaagcgtctcctcgagccaatccctggccgtactacaccggtcaagagtcggatccgttggcacatggcatctcgccgtctgtccgagtcaacggctggccgagcacgtggtacgaagacgcacagcactag

SEQ ID NO: 3459 - protein, 695 aa, Myceliophthora thermophilia
MTQRGRSSRHEGHGLQTQSNNAIPIPADSMAKNHKPPALSPAAAAQRRSFRVRPLSGDRPRGLKGEERGGNGLTDPEVPNQMPDAATTTTRVDLVYDPSQASRDMSVRLVLDVEEDWEHELEEFCRLKRLGLIKEAKEHFWSRLGHVSTIPYIRVQYAEMLQSCGDFKSLQCLDFLPEFPPDPWEETTEDRNRGKLVANHTLLDFLSQRPISDYVTAAWSFVRQTLKALASELVVGSTEIQMIVLCLRVLGYLKTCTSKAITGPVRVYAKHLFDWRRLYNDLVGESCVWDFKDLFLACVSVFGWPETIEQFFGTTHTPLALDTIIKDWNGEPLDEASMMGLLDLFTSPVLQSHIGRKARKTLLMHHAKALADSVEQNKPELMKTRPFIQWLLAKTAHELEAPPERPDGVRMEHFGGLKLDQGAGIHLPIYVPTRHSRKPDWDMFFFRSTPAQRRVVELAVRTAEQIGDYALQAEAMKLLILQSQDPWRLMSALASLQLETQGDKEGYLSTCLSMYLVATDLTAEANLLRDLERPCQGGNMLLFEQCENASLTWAWVMIRILLASSINGDAGSDTTTDSSEEPSPFLARRLHLDGTRLAPYIAEFGRAELGIDISPPMEPLSVDDRIEEPDYSDDQRIAALRRRFARGASEAREASPRANPWPYYTGQESDPLAHGISPSVRVNGWPSTWYEDAQH

SEQ ID NO: 3460 - DNA, 3561 bp, Myceliophthora thermophilia
atgggtttcgtcggcgtgtacaaggccgtctacgattacaccccacaggccgagggcgaactggagattgccgaaggagatttgctctacgtgttggaaaagagcaccgaggatgactggtggaaggccaagaagaaggcaaccgccgaggacgaggaggagccggtcggcctgattccaaacaactacgtcgaggaggcccaaccccaagggaaagcccgcgccctctacgaatatacgagacagaccgacgaggagctgtcgtttcctgaggatgcggaacttgtcgtctttgacacgtcagatccggactgggtcctagtgggtcacgacgacgactatggcttcgtccctgccaactacatcgagatcggggctccagagaccaaggaggaagagccggaagcatctgcccctgccccgcctccgcttcctgcgcgaacgccgagcgatgatgtgcagagccccccccttccggcgaggaaccaagccccctcggaagaaccgagctcggatgccacgtccgccgcccccaacccggccaccatgatcgctggtatgatggctgctcgcgcgaacgcagcccaccctccccctgctcccctcgaccttcagccccgtaacagggacgccgatgaggaatccgacagcgtgaaatccccgccgcttcctgcacggccgcgcggcgactctcacctctcggcggaatctccacgcccgtccccgccggtggaacaacgtaggcgcaacgatcacggcagccggaatgaccttgacaccccgcgcaccccccggacagcgcccctgacgccaggtgactttcacatgtacaacattaacgagatggtgtctatcatgggaaagaagaagaagatgccgaccaccctaggcctcaacttgcggactggcataatcatgatcgcccccgaatacgccgaggacgggccgacgcaggaatggaccgccgatcgcatgacgcactattcgcgcgaggggaagcacgtattcatagagctggtcaagccgagcaagagcatcgactttcacgcgggcgcaaaggacactgccgaggagattgtcgctatgctcggcgaaatggccggcgccgttcgcgccgagggtctgcgagaggtgatcatggctgccaccgggcccaaggggatacagcagaagaagggcgtggtcctgtacgacttcatggcgcagggcgacgacgaggtcaccgtcgccatcggggacgaggtcatcatcctggacgacaccaagagcgacgagtggtggatggtgcgtcgcgtcaagaaccagcgggagggcgtcgtgccgagcagctacatcgaggtcacggggatcctcgacacgccggcgtcgaccgtgacgaccactacgggcatcaacgtgggcaagtcgaccgtcgagcagaatcggctggaggaggagcgcctgtataaggaggccatcaaggctagccagcgggaagaacaaaaggagagggaaaggtcgagatctgaggtaggccccggattgcctttgcccgatcggagtagtagtctgtcggccagaaagagtaacaccgaggcgcaacagcggagcagacgcgaggacggccgcgccgaggcctcggcttcctcccggtccaacggcaggtcgaaacccgatcctaccaagatccgcacgtggacagaccgctccaagtctttcaccgtcgaggcccagttcctgggcgtgaaggatggcaagctcaacctccacaagctcaacggggtccggattgccgtgcccatctccaagatgtcgcttgaagacctggagtatgtcgagcggatcaccggtatctccctcgacgaagacaagccgctgtccgatctcaaaaagcgggcaaatggaggcgagggctcgcgtcggtctcctcccaaggtcggcgcgactatcgagcccaagaagccagactacgactggttccagttcttcctgaattgcgaggtccagccggggctttgcgagcggtactcgcaagctttcatcagggagtcgatggacgagagcgtcttgcccgacgttgacgtctccgtgctccggaatctggggttccgcgagggtgacatcatcaaggtgatgcggtacctcgacgccaagtattgtcgcgggaagaaggcggcgggggatgacgaagggagcggcggcctgttctccggtcctggaggtgccttacgcaacaataccaggaaaggccggccggctcctccggtcgagaccaacgacacgatcgacccgaaggccttatctctcgacaagaagaaggatgaagccaaggcaacgtctcccgccacgacgtcgacgtcccccggcgctgctaaacccgccagcgggtttgacgatgacgcatgggatgtaaagccgtccaagacgccggatccggcccctcagcagacatccgctcccccggcctccactgccgcgcccgctgctacctcggctcctgctccggccccgagcacggccaaactcacgggttcgatgcaggagctgtcgctgctgacccaacctctaaccccagagaaggtccagcccccagcctcggcccctccacccgccctgagcctgccgcccgccacgaccacggccccggcttcggctccagctcccgcgcaggtccctcagcctactggcgccaccccgggcttctttgcgggcatgcagccacccgctgtgaacggtcagcaaccggcgcaattcgcccagcagctaccacagaacctcgcccgccaacgaccgatggcgccgcagtacacccaaggccaaggtggcctgatgccgcctcctcccgcacgtccactctcggcgccccagactgcccaacccagcgcgtttgccccgccacctctgcagccccagatgacgggctatccgtcctcggcagcaggccaggtcgcgccacccggccagagcctcaacgacctccggcagcagcagcagtttgcccaggccatgcagcagcagcagcaacaacaacaacagatctccatgatgaccggcatgcagcagcaaccgcaacagactggtttcccgatgcagcagggcccattcatgccgcaacctacgggcatgggagttctgcagccacagcctaccgggctggccgggatgcagccgcagcccatgcccatgcaggtccaacctacgggattcatgggcgccggtttccctcagcaacagcagccacagcagctgcagccacaaatgactgggttgccgccgccacttgagccgcagcgcacggcaatgggcatgggaatgggcatgggcatgaacaatgttggtgtaggaatgggaatgcaaccccagcagcagcagcagcagcaaccgatgcagccgcagcccaccgggtttgggactgctggagggctgcagccgcctgcgcagccgctcgtgccgcagaagacgggtccgccaccgccggttaagtttggcatcaacgaagggcagaagaagttggcgccgcagccgacggggaggagagccaatctggctgctgctacgccggataatccgtttggtttctga

SEQ ID NO: 3461 - protein, 1186 aa, Myceliophthora thermophilia
MGFVGVYKAVYDYTPQAEGELEIAEGDLLYVLEKSTEDDWWKAKKKATAEDEEEPVGLIPNNYVEEAQPQGKARALYEYTRQTDEELSFPEDAELVVFDTSDPDWVLVGHDDDYGFVPANYIEIGAPETKEEEPEASAPAPPPLPARTPSDDVQSPPLPARNQAPSEEPSSDATSAAPNPATMIAGMMAARANAAHPPPAPLDLQPRNRDADEESDSVKSPPLPARPRGDSHLSAESPRPSPPVEQRRRNDHGSRNDLDTPRTPRTAPLTPGDFHMYNINEMVSIMGKKKKMPTTLGLNLRTGIIMIAPEYAEDGPTQEWTADRMTHYSREGKHVFIELVKPSKSIDFHAGAKDTAEEIVAMLGEMAGAVRAEGLREVIMAATGPKGIQQKKGVVLYDFMAQGDDEVTVAIGDEVIILDDTKSDEWWMVRRVKNQREGVVPSSYIEVTGILDTPASTVTTTTGINVGKSTVEQNRLEEERLYKEAIKASQREEQKERERSRSEVGPGLPLPDRSSSLSARKSNTEAQQRSRREDGRAEASASSRSNGRSKPDPTKIRTWTDRSKSFTVEAQFLGVKDGKLNLHKLNGVRIAVPISKMSLEDLEYVERITGISLDEDKPLSDLKKRANGGEGSRRSPPKVGATIEPKKPDYDWFQFFLNCEVQPGLCERYSQAFIRESMDESVLPDVDVSVLRNLGFREGDIIKVMRYLDAKYCRGKKAAGDDEGSGGLFSGPGGALRNNTRKGRPAPPVETNDTIDPKALSLDKKKDEAKATSPATTSTSPGAAKPASGFDDDAWDVKPSKTPDPAPQQTSAPPASTAAPAATSAPAPAPSTAKLTGSMQELSLLTQPLTPEKVQPPASAPPPALSLPPATTTAPASAPAPAQVPQPTGATPGFFAGMQPPAVNGQQPAQFAQQLPQNLARQRPMAPQYTQGQGGLMPPPPARPLSAPQTAQPSAFAPPPLQPQMTGYPSSAAGQVAPPGQSLNDLRQQQQFAQAMQQQQQQQQQISMMTGMQQQPQQTGFPMQQGPFMPQPTGMGVLQPQPTGLAGMQPQPMPMQVQPTGFMGAGFPQQQQPQQLQPQMTGLPPPLEPQRTAMGMGMGMGMNNVGVGMGMQPQQQQQQQPMQPQPTGFGTAGGLQPPAQPLVPQKTGPPPPVKFGINEGQKKLAPQPTGRRANLAAATPDNPFGF

SEQ ID NO: 3462 - DNA, 1614 bp, Myceliophthora thermophilia
atgaactctgcgcggcaatttcagaggtttgcgccgggcgcctcattgagggcatccgccctgcggagctcccgctacacgccaacttcgcactaccggttcctttcgtcgtcccggagagcgccactcagcgtttccgagagcgcgacatgctccgcatccgtccttatccagcgtcaaccgctcctgcgttctgcgctgcccaccagcgccatccggctcgaccgtccatcccaaaccgacgcgcgctccttccacgtatccgccaggttaaagcagcaagaacccgcagacaaggagggaaaggcacgagctgaagcgaaagagggcgagcagacgaaggactcgaaaaccaaggaagataccaaagaagagaaggcgagcgagggcgaggaagaggcggggcgtaagaaaaaggagaagaaagacgacctcccgccaccgccgccccatggcgacaagactccgtggcaagtgttcctggacactatgcaaaaggagttccagcagtccaaggagtggaatgagtcgaccaaggccctcgcgtcctccgcgaacgaattcgtcgagagtgaatccgtccggaaggcacggcaagcctacgaggccacctccggcgctgtcacgtccaccgctgctaaggtggtcaagacaactgccggggccgtcggcaagggcgccagttggacctgggagactcccgtcatgaagggcgtgcggaaaggcgcgagcaagacgggcgaggttctggacaaggctaccaagccgatccgagagaccgaggcgtacaagaacgtcaagaatgtcattgacgatgggagcagctcccggtacggtggctgggtcgacaaggaagagcgcaggaggctgagggagctgcgggagcagatgaacaagaagaacggggcgaacaaccctgtctaccaagaggaccccaatgccggaaccaacctcacggttcacaaggatgccgcatggaaggaggcctggagggaatttagggaccaaaacaaattcgtccagagcctcttcggcatgaagtcgatctatcaagagtcggacaaccctctgatctcgacggcacggagcatcacggacaaggttgcgggcttcttcgccgagaacgagacggccatggtgatcaagaagcttcggagcatggacccctccttcaagctcgagccgttcctccaagagctccgcgagtacatcctgcccgaggtcctggatgcctacgttaagggcgacacggagacgctgaagctgtggctctcggaagcccagtattccgtgtacgaggctttgaccaagcagtacctccaagccggcctcaagtccgacggcaagattctcgacatccggggggtggacatcctccgcgcccgcatgctcgaccccggcgagattcctgtcttcattgtcacctgcaggacccaggaggtccatgtctaccgtaacgcgaagacgaaccagctggcagcgggcatggaggacaaggtccagctcgtcacctacgccatcggcattacccgcatcgccgaggatgtcaacaatcccgagaccaggggttggcgattgatcgagatgcagaagagcggccgcgactacatctaa

SEQ ID NO: 3463 - protein, 537 aa, Myceliophthora thermophilia
MNSARQFQRFAPGASLRASALRSSRYTPTSHYRFLSSSRRAPLSVSESATCSASVLIQRQPLLRSALPTSAIRLDRPSQTDARSFHVSARLKQQEPADKEGKARAEAKEGEQTKDSKTKEDTKEEKASEGEEEAGRKKKEKKDDLPPPPPHGDKTPWQVFLDTMQKEFQQSKEWNESTKALASSANEFVESESVRKARQAYEATSGAVTSTAAKVVKTTAGAVGKGASWTWETPVMKGVRKGASKTGEVLDKATKPIRETEAYKNVKNVIDDGSSSRYGGWVDKEERRRLRELREQMNKKNGANNPVYQEDPNAGTNLTVHKDAAWKEAWREFRDQNKFVQSLFGMKSIYQESDNPLISTARSITDKVAGFFAENETAMVIKKLRSMDPSFKLEPFLQELREYILPEVLDAYVKGDTETLKLWLSEAQYSVYEALTKQYLQAGLKSDGKILDIRGVDILRARMLDPGEIPVFIVTCRTQEVHVYRNAKTNQLAAGMEDKVQLVTYAIGITRIAEDVNNPETRGWRLIEMQKSGRDYI

SEQ ID NO: 3464 - DNA, 906 bp, Myceliophthora thermophilia
atggtcctcgaggcggtaatgatcgtggtcgacaacagcgagagcagcaggaatggcgactacacaccgacccgctatgacgcgcagtgcgacgctgtgaatatcatcttccagaacgtcgtccagggcaaccctgagtcgtcggtcggtttgatgagcatgggcggcaagggccccgaggtgttggcgaccctcacgacggaccaaggcaagatcctggacggcttgcatcagaccaagaagaagatccggggaaatgcccacctctctaccggaatacaaatagctagccttgcgctcaagcaccgccagaacaagtcccaaagggcgcgcatcgtcgtcttcgtctgctccccgattgaagaaggcgagaaggagctcgtcgtccttgctaagaagatgaagaagttctccattagcgtcgactttgtgctgttcggcgatatggacgaggagaaccaggcaaagttggaggcgttcaaccgcgagatcaagggcaacaccgactcgtcgcaccttgtcgtcattccgcccagctcgaagctgctcagcgaccagctcatctcgacgccgatcttgcttggcgagggcgccgccggcggtgcgggcggcctgggtggtgatgccggtggctcgagcgaggacttcccgttcggcgtcgacccgacacaggaccccgagctagcgctggcgctgcgcatgagcatggaggaggaaaaggcgcggcaggagaaaagggcacgcgaggaggccgaggcggccaagaagaacagcttagaatccgtcaaggaggagggcgagtctgcgccgctgctggataaggatgggcagccgagcggcagcaagaaggacgatgatgataaaggaggcaaatcggacgatgccgacaagatggacacttcgtga

SEQ ID NO: 3465 - protein, 301 aa, Myceliophthora thermophilia
MVLEAVMIVVDNSESSRNGDYTPTRYDAQCDAVNIIFQNVVQGNPESSVGLMSMGGKGPEVLATLTTDQGKILDGLHQTKKKIRGNAHLSTGIQIASLALKHRQNKSQRARIVVFVCSPIEEGEKELVVLAKKMKKFSISVDFVLFGDMDEENQAKLEAFNREIKGNTDSSHLVVIPPSSKLLSDQLISTPILLGEGAAGGAGGLGGDAGGSSEDFPFGVDPTQDPELALALRMSMEEEKARQEKRAREEAEAAKKNSLESVKEEGESAPLLDKDGQPSGSKKDDDDKGGKSDDADKMDTS

SEQ ID NO: 3466 - DNA, 264 bp, Myceliophthora thermophilia
atgaaatgcgctgccttgtcatggttcaaactgagacaggactcattcgtccgagtagagctgttgttgttgttgccgggaaaccgtgatcatgaaggcactctcaagctcacgactttggagaagctgagcagcccttcaccatcgtcttgcttgcctaaccccgtctcagacgctcccaactttcccttcgacgttagctggttcgcctgctcaactgctacaacacttctcccggatacgctgggaactcctggcgcctaa

SEQ ID NO: 3467 - protein, 87 aa, Myceliophthora thermophilia
MKCAALSWFKLRQDSFVRVELLLLLPGNRDHEGTLKLTTLEKLSSPSPSSCLPNPVSDAPNFPFDVSWFACSTATTLLPDTLGTPGA

SEQ ID NO: 3468 - DNA, 723 bp, Myceliophthora thermophilia
atggtactcgcaaggagaggactggcgacgatggcgtccctgaagaaagccggaaaagtggtctgcattggccgcaactatgcggaccacatcgccgagctcaacagcgcccggccgaagcagcccttcttcttcctgaagccgaccacgtccatcctgcttcccggcgaggggcccgtgatccggccgcgcggcatcgacctgcattacgaggtcgagctcgcgctgattctgggcaagcgactgaaggatctcaacgcgcaggatgagcaggcggcgatggatgccattgagagctacgccctcagcatcgacatgacggcgcgcaacgcgcagaacgaggccaagaagaagggcctgccgtgggacatcagcaagggcttcgacacgttcctgccgctgagcaacgtgatcagcaaggcggccatcccggacccgcacaagatcgagctgtacctgagcgtcaacggcaaggtgcggcaggacgactcgaccgagctgatgctgttccggatcccccgcgtcctgagcgagatctccaaggtcatgacgctcgagccgggcgacatcgtcctgacgggcacgcccaagggcgtcggccccgtcgtgccgggcgacgtcatgcgggccggcatccgggtcgacggcaaggagctggaggaggccaagatcgaggtggcggtcgaggagtcgaccagttcgtacgagtatgccgagacgtaa

SEQ ID NO: 3469 - protein, 240 aa, Myceliophthora thermophilia
MVLARRGLATMASLKKAGKVVCIGRNYADHIAELNSARPKQPFFFLKPTTSILLPGEGPVIRPRGIDLHYEVELALILGKRLKDLNAQDEQAAMDAIESYALSIDMTARNAQNEAKKKGLPWDISKGFDTFLPLSNVISKAAIPDPHKIELYLSVNGKVRQDDSTELMLFRIPRVLSEISKVMTLEPGDIVLTGTPKGVGPVVPGDVMRAGIRVDGKELEEAKIEVAVEESTSSYEYAET

SEQ ID NO: 3470 - DNA, 168 bp, Myceliophthora thermophilia
atgtgcgacttcaccaagaattactacgtctacacctcctgcgtcgacccaggagctcactttttccgcacctccctggacggcaattctaagcagtcgtgccccaagggcccgcatgagcgctacatcatgctgccgggagagtgcccattgtgccatggcggctga

SEQ ID NO: 3471 - protein, 55 aa, Myceliophthora thermophilia
MCDFTKNYYVYTSCVDPGAHFFRTSLDGNSKQSCPKGPHERYIMLPGECPLCHGG

SEQ ID NO: 3472 - DNA, 546 bp, Myceliophthora thermophilia
atggagagcatccagctcgcacagatgctggcggacctgagcgacttgaacgcagcggaatcccccgccgccagcgctctcgtcaatgcaaacaaggccggcccgacatcagcgaccaccgaatcgggcagctccgccgaccaggtgcctgcgcgatccggcccacgacaccacaagcgcaccgggtccggcggctcggcagcctccgcgggttccgccttcatgtcgaggaccgcttcgccagccaagttcgacaagtacggccggcgcatcctcacgccccccaacacgcgcaccaactcggcctacgggtccatccccgggacgccacggcgagaatcagagccgatcgacgatgatgtcgacagagccaactcactcatggcgctctacgagattcgcgccaagctcagggaccagcataacagtcagaacctgaccagactgagggagaagattgccgctttgcatgccaagcaggtgcaagccgagaagaaggacggcgatgcggggaggaccaagttcagttatcccaagagcccctga

SEQ ID NO: 3473 - protein, 181 aa, Myceliophthora thermophilia
MESIQLAQMLADLSDLNAAESPAASALVNANKAGPTSATTESGSSADQVPARSGPRHHKRTGSGGSAASAGSAFMSRTASPAKFDKYGRRILTPPNTRTNSAYGSIPGTPRRESEPIDDDVDRANSLMALYEIRAKLRDQHNSQNLTRLREKIAALHAKQVQAEKKDGDAGRTKFSYPKSP

SEQ ID NO: 3474 - DNA, 315 bp, Myceliophthora thermophilia
atgaagtcctgctcggtcacgaggaccgtcctgacgacctgggacgagccgggccgcgcggctctcgaggtcctgccggtgttgatgacgcctgatggcgcaaagaatcttacgccgaggtcggacggagaccctccacctgaggctggcggaaagagatttgaggtgacgaacacgccggaggatgccagcctgttccgggagctcgaggatgacgtactggtgcccatgcactttgaattctgggcgcactttgctgagaagcggaacgcgctggctgcggtgctggggaaggatgttttggaggacaggtaa

SEQ ID NO: 3475 - protein, 104 aa, Myceliophthora thermophilia
MKSCSVTRTVLTTWDEPGRAALEVLPVLMTPDGAKNLTPRSDGDPPPEAGGKRFEVTNTPEDASLFRELEDDVLVPMHFEFWAHFAEKRNALAAVLGKDVLEDR

SEQ ID NO: 3476 - DNA, 1149 bp, Myceliophthora thermophilia
atggcgcttacagccagcacgaagcagaacgcgggaccgccgtcccaaacatcgacgatctctcctggaaagaaacagacgcctacacttactccatttgagtgcctgcaaagagagttcaatgacgacctcgaatatgtttcggtcgagatcgcggagaaagagacgcggaagatgctcagggcaaaggagggcaggaagcagtacctgcccggccagccgcgcatccgcctcaaccagccggcgcacaatgccgacgccaacgaagacaaacttctcaagtacctcagacaatgccacaataccgacggcctcgacgagcttctcccgtacatgcgatacatctttgtccagacaccatcacacacccacatcatgccactgcaccaccagaagtcccatgctcgcgagatcagggtaaccgaaagccctgggctgcacttggtctggtactacgagctcatcttcatcaaaccgatcccggcctacttctactcgcaagcgttttgggactatctggagaatgccgacaagaagctctacggcgcctgcctcggcttcatgcgcagctactacatgctcatacagtacaacctggactttgaactggcttgcaacctgcgcctgatcccacccaagggcgacggcaccatgccgacctatgaagaatggtgcgacttcatcgagcccttctcccaggtcggcgatgctcacgtgaaccggcgatatcactacggggagctccggctcacgcgcatcaaccgcgccgccgtgctgttcaagttcaacctggcctacttccacatctacccgcagtggggctccttcctcgagcacaccctcgcgcccatcatcaccgtcttcgccgtctgctcggtcgtgctcaactcgatgcaggtcagcctcgccgtcatcgagatcaagcacgagagtaaccagccgctgggcggggcgtggcccaggttcatggacgcctcgctctggttccccgtcgtcgtcatggtcagcatcgccgtcatactcatcgccgccctgtgcggcatgggcatcatgggcctgaaagacctgttccgcgggaactacgttcggaagcggaagaagaagggggatcctagcgccggcacgcggtctcacggtatggtctggtag

SEQ ID NO: 3477 - protein, 382 aa, Myceliophthora thermophilia
MALTASTKQNAGPPSQTSTISPGKKQTPTLTPFECLQREFNDDLEYVSVEIAEKETRKMLRAKEGRKQYLPGQPRIRLNQPAHNADANEDKLLKYLRQCHNTDGLDELLPYMRYIFVQTPSHTHIMPLHHQKSHAREIRVTESPGLHLVWYYELIFIKPIPAYFYSQAFWDYLENADKKLYGACLGFMRSYYMLIQYNLDFELACNLRLIPPKGDGTMPTYEEWCDFIEPFSQVGDAHVNRRYHYGELRLTRINRAAVLFKFNLAYFHIYPQWGSFLEHTLAPIITVFAVCSVVLNSMQVSLAVIEIKHESNQPLGGAWPRFMDASLWFPVVVMVSIAVILIAALCGMGIMGLKDLFRGNYVRKRKKKGDPSAGTRSHGMVW

SEQ ID NO: 3478 - DNA, 3222 bp, Myceliophthora thermophilia
atggatcgattcacgcgcaaagatgatggcgatgcgctgccactgtaccagaacccgcccgagtcaaggtcggcaggggtagctgcggagctggagcggtcgtggtctacttcacccaggctgggtcctcggacaacatcggcgcagtcaagaactgtggccgacgaatattcgtgcctgaccccagccgaagtcgcttcacggttaaagacgtcgctaacacacggcctcactcccgccgaagccctctcgaggttacgagactatggcccgaacgagatcccacacgacgagcccgagccgatatggctgcgattcctcaagcagttccaggagccgcttatagttttgctcctggtctctgccggcgcgtcactcctggtgggaaacatggacgattccgtgagcatcaccgtcgcagtgaccatcgtggtcagcgtgggcttcatccaagaataccgctccgagaagtccattgaggcgctcaaccatctcgtaccgaaccacgcccatctcatccgcaaacaagcaccgaattcttctcccggcgcgcggtcgccaaactggccgggcgacaaaaccccggattccacccccggctcggccacaccccaagaagaagtgctcgaggcgacctcgtccaaggtcatggccgcgcagctggtgccgggcgatctcgtgctgttcaccactggcgaccgcatccccgccgatatccgggtgaccaaggccaccgacctgaccatcgacgcctcgaatctcacgggcgagaacgaacccgtcagggtcaccgcgaatacccgccctcgccgtgcgattggcgtctccagcctagggaacgctactctgcaactgccccagccgtccgttggcggagcctccaacggccacgcggccgggcatgcaaagggggaccacgacggacttcacaatatcgcctacatggggactctcgtgaagtccgggcatggtcagggtatcgtttttgccactggcggtgacacgcattttggtaccatcgcaaccagtgtgtccggaacggagagccctcggtcgcccctgcaactctcgatggacgagctcggttctcagctcagcaaagtgtcttttgttatcattggcgttatctcgctcctcggctggtttcaaggaaagaagctgctggagatcttcaccatctctatctcgctggccgtggcagcgattcccgaaggcctgcccatcattgtcaccgtgactctcgccctgggcgtccaccggatggcgaggcacaacgcaatcgtccgcaggatgcccaaagttgaaaccttgggttcagtcaacgtggtctgcaccgacaagacagggaccctgacgatgaaccacatgacgaccgccaagatgtggtactttggggcagacaaggtggtcgacgttgagtccgatgacgaggcggagaacaaactcgacgctgccacgcttagaatcctgcgcatcggcaacattgccaacaacgcgcgcctcgcccgcaagtccaacgagaacggtgcggccgcgcgagccgtcctgtcctcgaccgaaaataggggccacgcctcgacatacacccgctgggttggtcagcccaccgatgttgccatgctcgacatgctggatcgcttcaaggagcacgacatccgggatgccatcgggcccagggtgtccgagacgcccttcagctcggaacgcaagtggatgggcgttacgatcggaagcgagggcgggaagggtgacaaggagttcgcgtacatgaaaggcgccatcgataaggtcctcgacgcctgcgatacctacgtcaccaaggatggcagggaggtcgttctggactctgcgcggcgacaggaggccctgcaggctgccgaggagatggcgtccacgggtctccgagtcttggctttcgcgagcgggcccgtctccaagccgagaagcggcagaccaggcgctaggagtaacactcctggctcggacagggcggagagccctgttcaccacggatccgaggaacagtataaaggcctcacctttgccggcctggtgggcatgagtgatccgccccgacctggcgtcgggcgctccatcaggaagttgatgcgcggccgtgtcaaggtcatcatgatcaccggcgacgccgaaactactgccctcgccatcggcaagcagctgggcatggcgattgctacccccactgcgcacgcgtccaaccaagtcacgatcaagccggtccttcgcggcgacgagatcgacgccatgtcggacgaagagctcgcaagagcaatggagcacaccaccatctttgcacgaaccaaccccgaccacaagctgaagatcatcagggcgctccagtctcgcggcgatattgtcgccatgacgggcgacggcgtcaatgacgcgccggctctgaagaaagccgacattggcatcgccatgggcatgcacggcaccgacgtcgccaaggaggccgccgacatgatcctcaccgacgacgacttctccaccatcctccacgccatcgaagaaggcaagggcatcttcaacaacatccagaacttcctcacctttcagctctccacgagcgcggccggtctctctctcgtcctcctatgcaccgcgttggggttcaagtccccgcttaacgcgatgcagattctctggatcaacatcatcatggacggccctcccgcccaatccctgggcgtcgaggcggtcgacaaggacgtcatgaaccggccgccccggcggcgcggcgacgcggtgctcacgcgccccctcatcacgcgcgtgctcacgcaggcggcggtcatcatggcgggcaccatgctcgtgtacacgcacgagatgctcgacgacggcgaggtgacgcggcgcgacaccaccatgaccttcacctgcttcgtcctcttcgacatgttcaacgccctcacctgccgctccgagagcaagagcgtgctgcgcggcgaggtcggcctcgccagcaacaccctcttcaactgggccgtcgccggcagcctgatcggccagctgctcgtcatctacttcccctggctccaggacgtcttccagaccgaggcgctcgggtggagcgacctgctgaagctcctgttgctatgtagtagcgtcttttgggtggacgaggcgcgcaagtggtggcggtatcggaacgggaggagaggctttgtcgggggtgggtatagccaggccgtttaa

SEQ ID NO: 3479 - protein, 1073 aa, Myceliophthora thermophilia
MDRFTRKDDGDALPLYQNPPESRSAGVAAELERSWSTSPRLGPRTTSAQSRTVADEYSCLTPAEVASRLKTSLTHGLTPAEALSRLRDYGPNEIPHDEPEPIWLRFLKQFQEPLIVLLLVSAGASLLVGNMDDSVSITVAVTIVVSVGFIQEYRSEKSIEALNHLVPNHAHLIRKQAPNSSPGARSPNWPGDKTPDSTPGSATPQEEVLEATSSKVMAAQLVPGDLVLFTTGDRIPADIRVTKATDLTIDASNLTGENEPVRVTANTRPRRAIGVSSLGNATLQLPQPSVGGASNGHAAGHAKGDHDGLHNIAYMGTLVKSGHGQGIVFATGGDTHFGTIATSVSGTESPRSPLQLSMDELGSQLSKVSFVIIGVISLLGWFQGKKLLEIFTISISLAVAAIPEGLPIIVTVTLALGVHRMARHNAIVRRMPKVETLGSVNVVCTDKTGTLTMNHMTTAKMWYFGADKVVDVESDDEAENKLDAATLRILRIGNIANNARLARKSNENGAAARAVLSSTENRGHASTYTRWVGQPTDVAMLDMLDRFKEHDIRDAIGPRVSETPFSSERKWMGVTIGSEGGKGDKEFAYMKGAIDKVLDACDTYVTKDGREVVLDSARRQEALQAAEEMASTGLRVLAFASGPVSKPRSGRPGARSNTPGSDRAESPVHHGSEEQYKGLTFAGLVGMSDPPRPGVGRSIRKLMRGRVKVIMITGDAETTALAIGKQLGMAIATPTAHASNQVTIKPVLRGDEIDAMSDEELARAMEHTTIFARTNPDHKLKIIRALQSRGDIVAMTGDGVNDAPALKKADIGIAMGMHGTDVAKEAADMILTDDDFSTILHAIEEGKGIFNNIQNFLTFQLSTSAAGLSLVLLCTALGFKSPLNAMQILWINIIMDGPPAQSLGVEAVDKDVMNRPPRRRGDAVLTRPLITRVLTQAAVIMAGTMLVYTHEMLDDGEVTRRDTTMTFTCFVLFDMFNALTCRSESKSVLRGEVGLASNTLFNWAVAGSLIGQLLVIYFPWLQDVFQTEALGWSDLLKLLLLCSSVFWVDEARKWWRYRNGRRGFVGGGYSQAV

SEQ ID NO: 3480 - DNA, 255 bp, Myceliophthora thermophilia
atgctccattccatggccaaagggggaaacgatgatgtacggacgtacatgtatctcgtcgtcgtcattacagctagtgtatttccgggatcgcgcgcgacaggggcggacggacagtactccaccttgtccccgaatccgcaagccagaagggggcaaggggtcccaggggaaggtgggaggatctcaaccccccggcccatcgcccaaagtctcaaacaggggcgtgaggaagggagcggcgagattaactaa

SEQ ID NO: 3481 - protein, 84 aa, Myceliophthora thermophilia
MLHSMAKGGNDDVRTYMYLVVVITASVFPGSRATGADGQYSTLSPNPQARRGQGVPGEGGRISTPRPIAQSLKQGREEGSGEIN

SEQ ID NO: 3482 - DNA, 330 bp, Myceliophthora thermophilia
atggcaaatctcatggctcatctcctaaacgagctagaccgcacttttctagcctcatcgatgttaatgagcacacattccctgcaacatcatcgacaccacaaggctacgccgggcccgccggtggcgctcggccgaggcacgtccaaccccggcgtagcagggaaccccggcgggcactgggagcccccagatctgcactctgggcatgccgcctggcggggaggaaacacggcagtgtttgcactcttttacgatgcggagcatcggcatgcaagagtcagggaacgactcaggcaggtccaggagttgctgaggctgaggcaatga

SEQ ID NO: 3483 - protein, 109 aa, Myceliophthora thermophilia
MANLMAHLLNELDRTFLASSMLMSTHSLQHHRHHKATPGPPVALGRGTSNPGVAGNPGGHWEPPDLHSGHAAWRGGNTAVFALFYDAEHRHARVRERLRQVQELLRLRQ

SEQ ID NO: 3484 - DNA, 651 bp, Myceliophthora thermophilia
atgggctctgtgcagcaacccgaagaggctgagtgcagcgtggcatttgggcaacactacgccatcctccaactggacctgatgtcggttctgatagatgccgcccaggacgtcgacgaagggcaagcgttcatttccagctgcgtacggtggaacgatgccgtgcaccgcaaggtccatcggccgcccaccatcttcaccactctctccttctcaaatgcttcgcaacccgagttggcacccgacgccgacgccccatttaccaaattggtacgagaattcggcacttttgagcgaggttcccccggggtccgaatagattctcgcttcgtggtcgatgagaaggacattgtcctggagaagacaagatggtacgccggcgccggcaatgccctagagcagatcctaaagtcgcagaacatcgacacggttgttatttccggcttgacactttcgggcgtggtgacgagcacggtttatcggctgttcgatttggactacagggtatatgtcatcgcggacaatgtgctggaaatgccagcgggccaggcaacggactttaagcgcgttatcttgaacactctgtttcccaagatgaacgtgcatgtcatctcgattgagcaagccttgctggctctggagcggtcttag

SEQ ID NO: 3485 - protein, 216 aa, Myceliophthora thermophilia
MGSVQQPEEAECSVAFGQHYAILQLDLMSVLIDAAQDVDEGQAFISSCVRWNDAVHRKVHRPPTIFTTLSFSNASQPELAPDADAPFTKLVREFGTFERGSPGVRIDSRFVVDEKDIVLEKTRWYAGAGNALEQILKSQNIDTVVISGLTLSGVVTSTVYRLFDLDYRVYVIADNVLEMPAGQATDFKRVILNTLFPKMNVHVISIEQALLALERS

SEQ ID NO: 3486 - DNA, 642 bp, Myceliophthora thermophilia
atgtcggaagggcgagccagagtcatatccactgagcctctcgccgccagcgaggcggtgtggacaaagctggtcaaaaaaacatataaagaccccaacggggtaacgcggacatgggagtccgccgagcgaaccactcggccgaagaacagcgatatcgacggcgtcggcatcgtcgccatcttggagaaggagacagggcccgagattgtcctccagaagcagtaccgtccgccgttggacaagatcgtcattgagctgcctgcaggcctcatcgacgagggagagacggccgagcaggcggcggtccgggagctcaaggaggagacgggatacgtggccgagcccctcgagacgtcgcccgtcatgttcaacgccgccctgaccatccggatgcctttagatcccggattttgcaacaccaatctccgcatggtccacgtcacggtggacatgagcctgccggcgaaccaagatctcaagcccgagctcgaggaaaacgagttcattgaggtgtttcacgtcaagctcgcggacttgtggagcgcgtgcatcaagctcgaggccgaagggtacgctatcgacgcacggatagccaacctcgccgagggtatcgagatcgccaagaagttcaagctttaa

SEQ ID NO: 3487 - protein, 213 aa, Myceliophthora thermophilia
MSEGRARVISTEPLAASEAVWTKLVKKTYKDPNGVTRTWESAERTTRPKNSDIDGVGIVAILEKETGPEIVLQKQYRPPLDKIVIELPAGLIDEGETAEQAAVRELKEETGYVAEPLETSPVMFNAALTIRMPLDPGFCNTNLRMVHVTVDMSLPANQDLKPELEENEFIEVFHVKLADLWSACIKLEAEGYAIDARIANLAEGIEIAKKFKL

SEQ ID NO: 3488 - DNA, 993 bp, Myceliophthora thermophilia
atgccagtcatccttgcggcgctctaccaaagcagaaccaccctcttccgcgcctggacctcgtcatcgccattcgcgtcccgagccgcgtgggcccctacgagttccaaaatgtccactttccaacaccccgagtaccacatccccatcaccctccctgagggtctgtcccagtcgcagctcttgagcttccgccccttcgcgacctcgctcgcggcccagcactcccgcccggaccacccgttccaccgagacccgtacgcgctgcgctccgtcaccgtccagtcctacgacctgttcggcaccggcaagggcaagggcggcggctcggcgccgcggctgggcttcgtcaagctgacgtcgcgcgtcgccaacggcgcgggcgagaccctgccgggggccgtgttcctgcgcgggccgtcggtcgcgatgctggtcctgctcgtacccgacgacgccgcagacgtcgacgcggagcggcgcgtgctcttgacggtgcagccgtgcttcgccgccggcatctttggcctggggttcgcggagctgccggcgggcatggtggacgagggcggcacgttcgcgggccaggcggcgcgcgagatggaggaggagctgggcctcgtcatcggcgagcacgagctcgtctgcctgagcgatttggcggggggggtcggcggcgcgggggagggagtaggaggaggaggaggaggaggagccgtcggcggagaggaccaccggctgctcccccgcgccgtgtatcccagcgctggcgggtgcgacgagtacatcccgatctacatgcacgagcgacgggtccccagggagcagctggcccagtggtcgggcaagctgacgggcctgagggaccaaggggagaagatcacgctcaagttggtgaggatgcgggatttgtggaaggagggagcgaaggacgccaagtgcctggccgcggtggcactctgggagggcttgaggagggagggcaagatctag

SEQ ID NO: 3489 - protein, 330 aa, Myceliophthora thermophilia
MPVILAALYQSRTTLFRAWTSSSPFASRAAWAPTSSKMSTFQHPEYHIPITLPEGLSQSQLLSFRPFATSLAAQHSRPDHPFHRDPYALRSVTVQSYDLFGTGKGKGGGSAPRLGFVKLTSRVANGAGETLPGAVFLRGPSVAMLVLLVPDDAADVDAERRVLLTVQPCFAAGIFGLGFAELPAGMVDEGGTFAGQAAREMEEELGLVIGEHELVCLSDLAGGVGGAGEGVGGGGGGGAVGGEDHRLLPRAVYPSAGGCDEYIPIYMHERRVPREQLAQWSGKLTGLRDQGEKITLKLVRMRDLWKEGAKDAKCLAAVALWEGLRREGKI

SEQ ID NO: 3490 - DNA, 1950 bp, Myceliophthora thermophilia
atgaggacgacaggtccaaccgcccgacggcgcaaccatgcatggcttcagatgaggaaccgactgaggaggtcggagcagcttgcgcggcgccagcagcaggatgatacgtcggaggacaacagcgattccctcgattcgctcgactcgctcgactcctccgatgacgggatcacgacgccccctggcccgactctacgtcagtctcttggtgccacaaaagtgcggccctcgcttgctgcttccgcgagcgcacgggtagaggctgtaggggctggccgacttgctcgacgccagcagggcgatacctcagacggtggtggtttctccgacaacgactccgtcaactccctcgactccctggattcgttgaactcgctcaattcttccgacaacgggaacgacgctggacctgtcccggcttcacgtccgactcgggtccctacgagggtgcaaccctcacttgctgcttccgcaagcgcccgtgcgaggatcgggcgtctctctcgacgccagcagcaagacgatgcctcggatgatgggtttacctccgataatgagtcgctcgactccctcgattcttctgactccctcgattcgctcgactcttctaacgacgggaacaaccctcagcctacgcagaccacgagcccggcttctgttgccgtcaaggtgcgaccctcgattgctgcttccgtgagcgcccgagtgcggacggagaagtggatcagagacctgcacgtcccgaggctggcacctggcgtcacccttgcagctgacgatgtcgacgcggccaaggaaccagaggataagcgtgaagagccagaagagcctgaagagcctgaagaccccgagtccgcgctggactctgcttctgatgggtttgagtctgacggagacgtgtccggtgatgaagaagatccggctgaggagtctacgacccctcccccggctgccacgacgcctccaggggaggcatctccgccgccaccggccatcacctcaacttcaggctctccaggaatcacgagcacaaccacggaacccatcgtcgcgccttcagcaagcaccggttcgacaagtcttgatgggctcgtgacctcgcttgtagggacgtcgttggcatcaccaacaagctcggcttcacctaccgttccggtgaccgacgcgacgcagtcccaagatggccaggtcatcccgcccattccccaagcggacgagcgcgggaaagagggtatcaatatcggcaacgctccttcaaacaagcttgacaagggcgcagtggcgggtatcgtcatcggtgttcttgcctttgtcggcattcttgtcggcgccgccctgctctggcgcaaacatcgccgcgaccgtggccttccattcttttcgcaagctcgcttgcgcctccgtgatgacgacgacgcgccgccgccacccgcagtcacggggcctctcccgggcagactgggcgggcccaacgcggccaagacgaacacccagatcatggacgacctgatgaaagccgcctacgcggccgataacggcaagaacgatatggcaggtgcctacgccccgccagccgagcccaagctgccgccccaacagttccagaagcagcagcagcagcagcagtcgcatcagcaacagcagccctatcaggaacagcgtcatcaagaggtcaatgtctacatggacgagaaggcgtacatggcgctcgcgggcccgcccacgcccggatcgaccatgaagccggtgatgcagtggctggagggggtgaagacgcccacgcagccgaacgggcccgagatccctcccacccccgcgatgccgcacaactcggcgaccatgccgagcggcggcacgagggggttgcagcagcccaagccggcttactacgggagagagaccatgaccaccgagaccacaaacactaccgcgcgctggtttggctaa

SEQ ID NO: 3491 - protein, 649 aa, Myceliophthora thermophilia
MRTTGPTARRRNHAWLQMRNRLRRSEQLARRQQQDDTSEDNSDSLDSLDSLDSSDDGITTPPGPTLRQSLGATKVRPSLAASASARVEAVGAGRLARRQQGDTSDGGGFSDNDSVNSLDSLDSLNSLNSSDNGNDAGPVPASRPTRVPTRVQPSLAASASARARIGRLSRRQQQDDASDDGFTSDNESLDSLDSSDSLDSLDSSNDGNNPQPTQTTSPASVAVKVRPSIAASVSARVRTEKWIRDLHVPRLAPGVTLAADDVDAAKEPEDKREEPEEPEEPEDPESALDSASDGFESDGDVSGDEEDPAEESTTPPPAATTPPGEASPPPPAITSTSGSPGITSTTTEPIVAPSASTGSTSLDGLVTSLVGTSLASPTSSASPTVPVTDATQSQDGQVIPPIPQADERGKEGINIGNAPSNKLDKGAVAGIVIGVLAFVGILVGAALLWRKHRRDRGLPFFSQARLRLRDDDDAPPPPAVTGPLPGRLGGPNAAKTNTQIMDDLMKAAYAADNGKNDMAGAYAPPAEPKLPPQQFQKQQQQQQSHQQQQPYQEQRHQEVNVYMDEKAYMALAGPPTPGSTMKPVMQWLEGVKTPTQPNGPEIPPTPAMPHNSATMPSGGTRGLQQPKPAYYGRETMTTETTNTTARWFG

SEQ ID NO: 3492 - DNA, 1029 bp, Myceliophthora thermophilia
atggaattcctaagcgaaacgtataccgacattcgtcagttcctgctctctgcggctcgctgggcttggggcatacctgacccgttgactatcgagttcttgcccagaacgtatgacgagaatggagttcagccgcgaaaacgatggatcaagctcattttacgctcctctcgctcgacctggcaccttaaactcaccttccaaggcactatcacggacgatcgacacccaatctttggcaaaaagccgaagcgtcggaaggatctacaggatctttgtcactgtattgactttcaccgggtacaacttttggacgatacagttaccgaggtcattctggcacttgaccccgttaaggagagcgttaggctgccgtacgagaaacgaccaggcccagataacgaattcttctccgtcatcgaccagctctgggtctatactagggaagacccagacagagtacggttcccaaccttcaatagtaatagttctattccgaccagggagctgtccgatattagaagcaaggaagaactcgacggccattcggtttacaaggtgcttcttcatagcgatgagacgccgtacatctacaaggagattgaacgaccacattatatccccgcagacacggaaaccacaccgtctgctaagaagagaagccccggcgtcttgcatggtgttcttctcgaataccatccaaatggcacattagaggatgcattgaagatacgagagccccagatcaatgggcgctggtgccagtgggcagtccagatcgcctcggcgctctttgaaatgcaccgacgtggtatcacccacatggatctaaagcccgccaacgtcgtcatcactgccaactttgacgcagtgctgatcgatgttagtggcatcggaggcgtcactcgtaaatggctttcccccgaaatgaggggtaacgagaacccattctccaagagcatcgaggaaaggaagcaaaatgacatctgggcgcttggacggataatgatggcaatggcggatgcgtaa

SEQ ID NO: 3493 - protein, 342 aa, Myceliophthora thermophilia
MEFLSETYTDIRQFLLSAARWAWGIPDPLTIEFLPRTYDENGVQPRKRWIKLILRSSRSTWHLKLTFQGTITDDRHPIFGKKPKRRKDLQDLCHCIDFHRVQLLDDTVTEVILALDPVKESVRLPYEKRPGPDNEFFSVIDQLWVYTREDPDRVRFPTFNSNSSIPTRELSDIRSKEELDGHSVYKVLLHSDETPYIYKEIERPHYIPADTETTPSAKKRSPGVLHGVLLEYHPNGTLEDALKIREPQINGRWCQWAVQIASALFEMHRRGITHMDLKPANVVITANFDAVLIDVSGIGGVTRKWLSPEMRGNENPFSKSIEERKQNDIWALGRIMMAMADA

SEQ ID NO: 3494 - DNA, 1110 bp, Myceliophthora thermophilia
atggtcaagtttgagcttccccgattgggtcgctctcactcgaccacatcgtcgagacgccggtcgcggacaccagtgcccgctaagccgggcatcgaatactatccgccatgtttcgacagcgatgatgaattcgagacggactcttccggcagctgtggcagcgacggccagcttcgcttcgacaagcggccgattcttcgcacgcggccatccttgaggtcatcgggcggcagcgaggtcaagaaaccgacctcgctcctcactcttgcgctggctcgctcaactagacggacggcggtagcgcccatgcccatcaccacgcccgggggagagtgggaagacacgagcgatggcgccgacagcgagactgaggtcgacagcgacagcgacggcgactatctgcccccgagccaacgagtgctcgcggacatgcagacccccgactcttgcccggcatccgtcttcgactccgagcagcagatggcccgcccacagcaacagcaacagcagccggccattatccagaccgtagcccgctccctggccggtctcatgtccgccatcatcagcagggtcaccgccgccggccacccgcgaaccagacaaggcaaaaaaggcaggggagaagacacggcgaccaccaaagaagcagagcggaccgatcccgctaccgccgccaccaccacgacggacagcgtccccatcccccaggagaagagccgccccattgctatcccgccgccgccgcagctggagacgacggtgccgttccgcgagggctggctcaacgagcggctgcagatcgcgcgcgcggggcccctcttcctcacctccaccaccaccaccaccacctcctcctcctcttcttcttcttcttcctcctcctctccccggcgggtgcgccagcgcgtggctgaccggcgcggcgtcgtggtgatggggttggataacaaagccggattacggaacctaatagactgggaccgggaccggaactgggcgtgctgcgggtgcgccagcggcaacagccggtacgagttcctgtgttggtcgtgcggggcgcactcgaggggtgcgtgctgcgacgacgcggccgagatggcgtga

SEQ ID NO: 3495 - protein, 369 aa, Myceliophthora thermophilia
MVKFELPRLGRSHSTTSSRRRSRTPVPAKPGIEYYPPCFDSDDEFETDSSGSCGSDGQLRFDKRPILRTRPSLRSSGGSEVKKPTSLLTLALARSTRRTAVAPMPITTPGGEWEDTSDGADSETEVDSDSDGDYLPPSQRVLADMQTPDSCPASVFDSEQQMARPQQQQQQPAIIQTVARSLAGLMSAIISRVTAAGHPRTRQGKKGRGEDTATTKEAERTDPATAATTTTDSVPIPQEKSRPIAIPPPPQLETTVPFREGWLNERLQIARAGPLFLTSTTTTTTSSSSSSSSSSSSPRRVRQRVADRRGVVVMGLDNKAGLRNLIDWDRDRNWACCGCASGNSRYEFLCWSCGAHSRGACCDDAAEMA

SEQ ID NO: 3496 - DNA, 2244 bp, Myceliophthora thermophilia
atgcggtccctcaaacgaacatcacgccgcctccgggcaaccccgctcaccactgcccagccgccgaccccgtcctccccattcctcctccagcggcgcccggtacccacccatcccgccagctccaacaccaccacgaccgtgaccccgatcaagtcgctgctgatcgccaaccgcggcgagatcgccctgcgcatcgcgcgcaccgcggcggccatgggcatccgcacaaccacgctgtacacggacgtggacgcgggctcgcagcacgtcaaggcgtcctcgccacacgccctcgccctcggcccggccgcgtcgggctacctcgacggcgcccgcatcgtgcagcttgcccgccagcacggcatccaggccctgcacccggggtacggcttcctgtcggagaacgccgcgttcgcgcgcgcctgcgaggaggccggtatcgtcttcgtcggccccccagcccgcgccatggccgacatgggcgacaaggcgcgcagcaaggagatcatgacggccgccggcgtgccgtgcgtccccgggtaccatggccccgagcaggcaccggcggagctgagggcccgagcggcggagatcggctaccccgtgctgctgaagagcgtcaagggcggcggcgggaaggggatgcgcatcgtgcggagcgacgacgagttcgaggcgcaactgcggagcgcgcgcgccgaggcgagggcgagcttcggggacggcggggaggtcatgctggtggagaagtacgtcgagcggccgcggcacgtcgaggtgcagatctttgccgacaagtacggaaactgcgtggcgctgggcgagagggattgcagcgtgcagaggcggcaccagaagatcttggaggagagccccgccccgttgctggacgacctgacgaggcatgacctgtgggacaaggcgcgcacggcggccctcgcggtcggatacgtgggggccgggacggtcgagttcatcctggacaaggacacgggcaagttctactttatggagatgaacacgcgcctgcaggtcgagcaccccgtcagcgagatggtcacgggcaccgacctggtcgagtggcagttccggatcgccgccggcgagcggctgccgctgacgcaggacgagatcgaggcgcgtatcctcgagcgcggcgccgccatcgaggcccgcatttacgccgagaaccccgacaagggcttcttccccgactcgggcaagctggtgcacctcgtcacccccaagacggatcccgacgtccgcatcgacgctgggttcgtcgagggcgacaccgtgtcggaggcatacgacggcatgatagcgaagctgatcgtgcgcgggcgggaccgcgagacggcgattcgcaagctggagctggcgctgcgcgagtacgaggtcgttggtctcagcacgaacatcgagttcctcaagcgtctgtgccgcagccaggcgttcatcgacggagacgtcgaaaccggtttcatcgagcaccggaaggacgagctcttccagccgaggcacatgtcggacgaagtatttgcacaggcagcgttgggccttctcagctcccagatcaagtcgaatgtcactgccggaccgcacgggggcaccctcgggtttggcgaaaaggggctacagaacacgcgcaagtttgcctttagcgtgcggaacgatgccgccgccgccgccgaggagagcgaagccgaggttgtccaggtggaagtcacccagcaggggaatgcgctctacagtgtgtcagtcgcgcgaaacaacagccggacgcccatcgtgttcgagaacgttgtcagtgagccgtcgctcactggcgccaccaagaccaagatcacctccttcttccccatggcgcgcatcgagtcgaccgtagtgcaggacccggctgctccggagaagctgaccatcttccaactgggtgagaagacggagctaacgctagtgccgcccggctggtttgataaggcgctggggctgaaggaggttgtgggcagcgtcgtggcgcccatgccgtgcaagatcttgaggaatgaggttgccgaggggcagacggtggagaagggagctccattagtagttatcgagtcgatgaagatggagacggtgattcgatctccacagaatggtgttgtcaagaggctagcacacaaagaaggggatatctgcaaggccggcacggttctggtcatttttgaagacgctgagggcagcaagtcggcccagtga

SEQ ID NO: 3497 - protein, 747 aa, Myceliophthora thermophilia
MRSLKRTSRRLRATPLTTAQPPTPSSPFLLQRRPVPTHPASSNTTTTVTPIKSLLIANRGEIALRIARTAAAMGIRTTTLYTDVDAGSQHVKASSPHALALGPAASGYLDGARIVQLARQHGIQALHPGYGFLSENAAFARACEEAGIVFVGPPARAMADMGDKARSKEIMTAAGVPCVPGYHGPEQAPAELRARAAEIGYPVLLKSVKGGGGKGMRIVRSDDEFEAQLRSARAEARASFGDGGEVMLVEKYVERPRHVEVQIFADKYGNCVALGERDCSVQRRHQKILEESPAPLLDDLTRHDLWDKARTAALAVGYVGAGTVEFILDKDTGKFYFMEMNTRLQVEHPVSEMVTGTDLVEWQFRIAAGERLPLTQDEIEARILERGAAIEARIYAENPDKGFFPDSGKLVHLVTPKTDPDVRIDAGFVEGDTVSEAYDGMIAKLIVRGRDRETAIRKLELALREYEVVGLSTNIEFLKRLCRSQAFIDGDVETGFIEHRKDELFQPRHMSDEVFAQAALGLLSSQIKSNVTAGPHGGTLGFGEKGLQNTRKFAFSVRNDAAAAAEESEAEVVQVEVTQQGNALYSVSVARNNSRTPIVFENVVSEPSLTGATKTKITSFFPMARIESTVVQDPAAPEKLTIFQLGEKTELTLVPPGWFDKALGLKEVVGSVVAPMPCKILRNEVAEGQTVEKGAPLVVIESMKMETVIRSPQNGVVKRLAHKEGDICKAGTVLVIFEDAEGSKSAQ

SEQ ID NO: 3498 - DNA, 1719 bp, Myceliophthora thermophilia
atgaccactgggccttcgccctttgtcattttccagaagcagccgcaggagacccacccctccatcggcaacctggtgctccttgtggtcggcgccgtcctccaggtcgtctgcgttagcttgcccggttacatcatcgcgcgcctgggccactttgacgccgagaagcagaagttcctcgccaacctcaatgtcatgctattcacgccatgcctaatcttcaccaaactcgcctcgcagttgaatgccgataagctcatcgaactcggcgttatccccatcatcttcgtcatccagacctttgtctcgtacatcgtctcgagggtcgtggcgaaatgcttcggcttcaaccgacgggcctccaacttcgtgacggccatgggcgtgttcggcaactccaattcgctccccatctcccttgtcatttcgttgtcgcagacattgaaggggctgcactgggataaaataccgggcgacaacgacgatgaagtggctgcgcggggcattctctacctgctgctcttccagcagctcggtcagctggtcagatggagttggggttaccacgtcttgttggcaccgaaatccaagtatgaagagtacaacgacgaggccatcgaggagggccgccatcgcgacgaagaggtggaggatgcagacgaaacgcaggggctgattgaaggcattgacatactccacgaaaccgagacgcacgagcacgagcacgagcaccatcggtcttcgagtcccacacgcacggacgattcatcggcccgttacgaaccagccggaaggacgcctgtcgggggttcctcgggcgcgtcgcccaacgactcagaggatgaggagcagcatgacggggtatggaaggcgaatggaaagccgtccgcggacgaacttggattgcacagccagctcgaaggccacgaagatttggacaggatgctctcttttcctcgcatcaacaaagccgacgcgttggaagcgaggccgggcatcaaaggcgtccccgtgaggttgcgacgcttcatccgacggtgggagctcaagatctgggactccctccgcgccgccggccggcgtgcgtacaactccctcccgcgccccatccaggccaccctcacgacgctgtaccgcgcgtgccagcgcgtctaccgattcctctgggacttcatgaacccgccactctgggcgatgctcatcgccgtctttgtcgcctccgtccccgacttgcaagccctcttcttccgcgaagggtccttcatcaagacgtccgtcacgagcgccattagctcctcggccggagtcgcggtccccctgatcctcgtcgtcctcggcgccaacttggcacgcaacacgcaggtcagcgatgacgagacggacccggaggagaagcagatcggcacgcgcctgttggtggccagccttatcagccgcatgctgctgccgacgctcatcatggctcccatcttggccctgttcgccaagtacgtgcccgtcagcatcctcgacgaccccatctttgtcattgtctgcttcctgctcacgggcgccccgagcgccctgcagctggcgcagatctgccagatcaacaacgtctacgagaccatcatggggaagattcttttccagagctatgttgtctggttagtcgctaccaccccacacacccgcgcacgatttcaacttccactcgaaacccgaatttcaatgtgctaa

SEQ ID NO: 3499 - protein, 572 aa, Myceliophthora thermophilia
MTTGPSPFVIFQKQPQETHPSIGNLVLLVVGAVLQVVCVSLPGYIIARLGHFDAEKQKFLANLNVMLFTPCLIFTKLASQLNADKLIELGVIPIIFVIQTFVSYIVSRVVAKCFGFNRRASNFVTAMGVFGNSNSLPISLVISLSQTLKGLHWDKIPGDNDDEVAARGILYLLLFQQLGQLVRWSWGYHVLLAPKSKYEEYNDEAIEEGRHRDEEVEDADETQGLIEGIDILHETETHEHEHEHHRSSSPTRTDDSSARYEPAGRTPVGGSSGASPNDSEDEEQHDGVWKANGKPSADELGLHSQLEGHEDLDRMLSFPRINKADALEARPGIKGVPVRLRRFIRRWELKIWDSLRAAGRRAYNSLPRPIQATLTTLYRACQRVYRFLWDFMNPPLWAMLIAVFVASVPDLQALFFREGSFIKTSVTSAISSSAGVAVPLILVVLGANLARNTQVSDDETDPEEKQIGTRLLVASLISRMLLPTLIMAPILALFAKYVPVSILDDPIFVIVCFLLTGAPSALQLAQICQINNVYETIMGKILFQSYVVWLVATTPHTRARFQLPLETRISMC

SEQ ID NO: 3500 - DNA, 1278 bp, Myceliophthora thermophilia
atggcggctgtggtgtcgtcggctgcaccacagtggcagcagcatcagcagcagtcgcctcacttcgacgcatctttgggcatccgtccggtgccagagattggtgggagccaatcattcgcgggccatgctcgcggggaggaggagctgtcgcagcatccacattccaaccgttctcttgccgccggttatcttcaccggactgctggtggggctgtgggtttggtacgtgccatgagggccatgtcatgcaaagaaacaatacctctgacgacggcgctggccaggaagtgcatcatgatggtggtgttccagaacaagatcatctacatgcccggactgccgcccacctcgcgcagggagcagatagcgaactgggcaagcatgtgtggaggcgtccagtggacggaggagagaacggtggccgaggacgggaccgagctggccctggccgtgacgaccgttcctctcccgaagggaagacgtccggccgctgcggcggccaagaaccagcccgccccggcccatgtctatgtgctctacttccagggaaacgcgtcgtccataccaccacggctacctgacctatcctggacccttcgggcagtcagtgacagcaagacgcatgcgctggcgccgatggagctgacctttgtctgcctgagctacagaggttactggacctcgcgtggcaggccctcggagccggggcttcggctggatgccgaagcgggcgtgcggtggattgccgagcgccacgaacgcgtcttcgggaaggtcggcatcggggccaccgagcccatcctcctcgtctggggccagagcatcgggtcaggggtagcgacgaacctcgcggcgactggccgagttccagccgggatgccgatcagaggcctccttctcgagactccgtttgtgtcaatcagggccatgttggagaccttatacccccaaaagtggctaccgtaccgatacctgtggccatttctccggaaccacctagacagctgggagaacctgggcctgatctcccaggcttccgaggagaagggtgttccgggtccaatggtctacatcctcgaggccgaaagagacgaactcgtgccgaaggaacagagcgagcgtctttaccgaaggtgtgtggacctagggctaaccgtcgaaaaggtaactgtgcctgtggcattccaccagcaggccatcgccaggggggatgggaagaagttggccgcccaggccctcttggaaatgacccagagcgcgtggaagagtggttga

SEQ ID NO: 3501 - protein, 425 aa, Myceliophthora thermophilia
MAAVVSSAAPQWQQHQQQSPHFDASLGIRPVPEIGGSQSFAGHARGEEELSQHPHSNRSLAAGYLHRTAGGAVGLVRAMRAMSCKETIPLTTALARKCIMMVVFQNKIIYMPGLPPTSRREQIANWASMCGGVQWTEERTVAEDGTELALAVTTVPLPKGRRPAAAAAKNQPAPAHVYVLYFQGNASSIPPRLPDLSWTLRAVSDSKTHALAPMELTFVCLSYRGYWTSRGRPSEPGLRLDAEAGVRWIAERHERVFGKVGIGATEPILLVWGQSIGSGVATNLAATGRVPAGMPIRGLLLETPFVSIRAMLETLYPQKWLPYRYLWPFLRNHLDSWENLGLISQASEEKGVPGPMVYILEAERDELVPKEQSERLYRRCVDLGLTVEKVTVPVAFHQQAIARGDGKKLAAQALLEMTQSAWKSG

SEQ ID NO: 3502 - DNA, 1182 bp, Myceliophthora thermophilia
atggctgacgaacccacgctccctcctcttccccctttgcaggcgggcgacagaaagaaacggagccgtcggccagactctcctcctcctccgccacactcctcatcaagcgatcctgccttcttctccagcgatgacgacccggccatcgacaactaccagaccctcgggcgccgcaagcgcaggtacgtgggcacttggtatgaccagcagcccgcatcgtccgactcggccttgggcgacgagacgcagccgcgctaccctccgcctcgcggcaccaaaccgccaaagccgcagaagcgcgagttccgaaggcagctcgacagcggcgtctggatgggtaccgaaggctccgtcaccgacaccgacgacggcttcgacctcgaaccagccgccgcgagactaccactcgcggctccccgacctcgcgttacggcgatgccgcctccttcggttcggccgcgcctctcgccgctggagcagagagtccaggacgccatcgacttttgcgtcgagaccggcaccgagcaggttgacctctccggcatggacttggagaccattccagaccaccagatccggtccctctccaacatcgtgcccatcccacatgtgacaagggatgtggcctttgagcagagagagcccgagatccagctttttctctccaacaaccgcctgcgccgcttccccgtcgccctcgtcaacgtcgagaacattacggtccttagcctgcgcgccaaccgcttggtgaccctccccccggcgatcgccaagctccgcgccgtaaacatccgccgcgagggcggcgccagctgcgccgtatgcggccgcgacaaagccatgccgcgggcgctatgggtcgagtttcgccgcgtcggtcgggcggcggccgcggccgcggtcgccggcgagggcgccgacaacgacggggcggaggggcgggggagaggagtaggaggaagagaggcgggcgaggagacggctggcgcctccgccgcagccgccgccgccgccggtgccgggtttccgtcggccgcggcggggatggggatggggatgggggccgagggcgggggtatggtgttggtgccgttcctgcgcgtcgcgtgctcgtgggcgtgcgtgcctgtcaaggtgggcgaggtccggacggagcgggaagaggaaggggaggtctga

SEQ ID NO: 3503 - protein, 393 aa, Myceliophthora thermophilia
MADEPTLPPLPPLQAGDRKKRSRRPDSPPPPPHSSSSDPAFFSSDDDPAIDNYQTLGRRKRRYVGTWYDQQPASSDSALGDETQPRYPPPRGTKPPKPQKREFRRQLDSGVWMGTEGSVTDTDDGFDLEPAAARLPLAAPRPRVTAMPPPSVRPRLSPLEQRVQDAIDFCVETGTEQVDLSGMDLETIPDHQIRSLSNIVPIPHVTRDVAFEQREPEIQLFLSNNRLRRFPVALVNVENITVLSLRANRLVTLPPAIAKLRAVNIRREGGASCAVCGRDKAMPRALWVEFRRVGRAAAAAAVAGEGADNDGAEGRGRGVGGREAGEETAGASAAAAAAAGAGFPSAAAGMGMGMGAEGGGMVLVPFLRVACSWACVPVKVGEVRTEREEEGEV

SEQ ID NO: 3504 - DNA, 795 bp, Myceliophthora thermophilia
atggcagcacccgtagaccaacggatcgccgttcccattgatgaccccaacgccgacactgaatggaatgacattctccgcaaacacggcataatcccggagaagccgccctcccctaccccgctcatcgaggaggccattctggaagcgcgccggctggcgcacaagaaccgcctcgaaggcaaggacctttccgacctctcggatctcgaagacgaagaagacgaggcctttctcgagcaataccgccagaagcgcatccgggagctctcggagctccggcaaaagtcggtccacggctccgtctaccccatctccaagcccgactacgcgcgcgaggtgaccgaggcgtcgcagaacgggcccgtgctcgtcaacctcacttcgtcgcagggcagcaacgtcgagtcgcgcgtgctctcgggtctctggcgccaggcggcgcgcgagtacggagacgtcaagttctgcgagatgcccgccgacaaggccatcgagggctatccggagcgaaactgcccgacaatcctggtctacaacaaaggtgacatcgtcaagcaaatcgtcaccctggcgacggtgggcggggtgcgcatgagcatgctcgatctggacaagattctcgtcgaagtgggcgcggtcaaggaagatgacttgcgagtggtcaagcggaggagggcagcggaggatgccgaagaggaaaacgccgcgggtggcagcaggggtatcaggactagtagtagggttgcggcgaaacgaaatgacgacgatgacgacgacgatgattgggactga

SEQ ID NO: 3505 - protein, 264 aa, Myceliophthora thermophilia
MAAPVDQRIAVPIDDPNADTEWNDILRKHGIIPEKPPSPTPLIEEAILEARRLAHKNRLEGKDLSDLSDLEDEEDEAFLEQYRQKRIRELSELRQKSVHGSVYPISKPDYAREVTEASQNGPVLVNLTSSQGSNVESRVLSGLWRQAAREYGDVKFCEMPADKAIEGYPERNCPTILVYNKGDIVKQIVTLATVGGVRMSMLDLDKILVEVGAVKEDDLRVVKRRRAAEDAEEENAAGGSRGIRTSSRVAAKRNDDDDDDDDWD

SEQ ID NO: 3506 - DNA, 807 bp, Myceliophthora thermophilia
atgtcggcccacccggacctcaccggcttcagcgccctctcctttgactgctacggcaccctgatcgactgggagtccggtctggcggccgacctgcagccgctcatcgacgccctgccctcctcccatccgttccgcagcgacccctcgctggcggtgcggcggttcaacgaccactcggagcacctctgggcgacgcagcccaagctggcctacgacgccaacctgaccgagtcgttccgccggctcgcccgggaggaaggggtggccgccgacgggttggacgacggggcggcggcgcggcggatcggcgacgggccgggccggtggccggcctttggcgacacggtcgacgccctccgccggctggggcgccactacaagctcgtggtgctgagcaacgtcgacgaggccaacattgcccgggcgcgggcggggccgctggccggcgcccgcttcgacgccgtctacacggccgaggccatcggcagctacaagccgagcctcgacaacttccgctacctgttcgagcacgtccggcgcgacctcggcgtcgacaaggaccgcggcggcctgctgcacgtcgcccggagcctgacggccgaccacgtccccgccaagcaggtcggcctgaggagcgtgtggatcgcccgcggcggggacaagcccgaggggtacggcaccggcggcgactacgagaagctcaaggccgaggggaagctcggcttcgagtggctgttccagacgctcggagactttgcggacgaggtggacaggcagtttgccgagaaggcggcggccaagtaa

SEQ ID NO: 3507 - protein, 268 aa, Myceliophthora thermophilia
MSAHPDLTGFSALSFDCYGTLIDWESGLAADLQPLIDALPSSHPFRSDPSLAVRRFNDHSEHLWATQPKLAYDANLTESFRRLAREEGVAADGLDDGAAARRIGDGPGRWPAFGDTVDALRRLGRHYKLVVLSNVDEANIARARAGPLAGARFDAVYTAEAIGSYKPSLDNFRYLFEHVRRDLGVDKDRGGLLHVARSLTADHVPAKQVGLRSVWIARGGDKPEGYGTGGDYEKLKAEGKLGFEWLFQTLGDFADEVDRQFAEKAAAK

SEQ ID NO: 3508 - DNA, 156 bp, Myceliophthora thermophilia
atgactgcggaatgtttccaaggacgcccgtcagcgctgccccctgtcaagtcgattggctccgctttgactgatctaggcggcctcgccgccggtgtcaagcccggttcctgtttggttcgatccggcacccccgacgcccacgacgaggactga

SEQ ID NO: 3509 - protein, 51 aa, Myceliophthora thermophilia
MTAECFQGRPSALPPVKSIGSALTDLGGLAAGVKPGSCLVRSGTPDAHDED

SEQ ID NO: 3510 - DNA, 495 bp, Myceliophthora thermophilia
atgaacaatccatcgtgtacggtcgtgtacggacaacacttggctgtccccgtagtgtaccaacgcggccttgatatgctgctgctgacaaacaaagccccgtctcagggtcgttgtgccgtcattccgtcattgagacaaacgatgaacaaactaaccgacgctaacccgccaaccagccgtcctcagcccaccgatcctcttgggggtttgcctgcgcaaaaagtggccacgtcgacgtcatggacgccgcaagcagatcactcggccccgctgagcaagcagccccagacactgtgtacactacgaggtatgatgggaaaaactggtggtagaggcctgagaggtttttccgagagatccctgtcggtacctgtgcagggggtgaaactttggctcgcaaccatagtacactactacgtacctagcagtagtgtagagtacttccctagtcaagtgtacaactccactacgctaatccgtagtgtagtgtaa

SEQ ID NO: 3511 - protein, 164 aa, Myceliophthora thermophilia
MNNPSCTVVYGQHLAVPVVYQRGLDMLLLTNKAPSQGRCAVIPSLRQTMNKLTDANPPTSRPQPTDPLGGLPAQKVATSTSWTPQADHSAPLSKQPQTLCTLRGMMGKTGGRGLRGFSERSLSVPVQGVKLWLATIVHYYVPSSSVEYFPSQVYNSTTLIRSVV

SEQ ID NO: 3512 - DNA, 1854 bp, Myceliophthora thermophilia
atgaccgccaccgacctttcctggtcctcgtcaaaaggcgcctcgcgtgccggtactcaatcaagacccagagccattcccgacccggcaatccctccctcgtctccctcgaccgttgcacaggtttccgccgagggagagtcgacaatgcctcccaacaatgatcccaattctcgcgagacactcgccgtgcatacctccctcctcttcgaccccatccagaagtcctttctgaagaatgtctcggttgaggttaacaccaaaaccggtgccattgcccgtctttaccaacgcgacagctcccatctcccgggccctctgtccgagcacgatatcgatctccgcggcaaagtagtcctcccgggctttgttgactcgcacacccacatcttcctgcactcagacaagtacttccccctcctccattctcccttaccccttacccgggggggccggcttggcccccgccccatcctcctttccaccatccttacttggaaccagactgatcacaacccaattagagaacgtcttcactcacaccagatgcgcgacgagtcccccgtcgagcgcaccgtgcgggcggtcaaccacgcccgcgccgccctcctggcagggtacacgacgtaccgggacctgggcaccgaggcgctgggcaacgccgacgccaacctgcgcgactgcatcaaccgcggcctgacgcccgggccgcgcctgctcgtcgccaccgaggccctcgcctcgaacggcagctacgagatccgcaccgagaaccgcctcgcccgcgggtccgccgtgggcctgaccctgccgcgtgcctcggacccggccgacggcgtctgggccgtccgcgcagccgtccggaggcgcgtcggcgagggcgccgacgtcatcaagttctacgccgactaccgccgccgcgtgatgcgcttcccgcccgacaccgagggccccggcggccgcctgctgttcccgcccgaccgccgcgagaggaaccccgcgctgccgctctactcgcaggaggagatggacgccatcgtcgccgaggcgaggctggccgacgtgcccgtggccgcccacgccgccgagacgagcaccgcgctgatggcagtcagggctggcgtcaccacggtcgagcacatcttcgccgacacgtctcggtgccgggacgagatggtggccgagatggcggggaggggcaccatctgggtgcccacccttagcacggccgaggaagggttcgacgagcacaagtttgagtgctgcaagagggccgtcaaggaggcctttgatcggggcgtgaggctggcggccggggccgacaccggcgtcttcaaccacggccgcaactgcagggagatggagatcatgatcgaggccggcatcccggtggaagacgtgctcgtcgccggtacgtacaccgggtggcatgcctgcggcggggacgcctccgggttccggttcgggtggtgggacgagggtaaccgggccgacattgtcgccctggacgccgaccccagagaggacccgaaggcgttccggaaggtcagcttcgtcatgaaggacggcctggtgtggaagcgggacgggcggccggtcgacgcgttccctgcgacgcagtggccggaggaggaagccgcagagtcggccgaggagagcgggacactcagggagccggcggcgatccctctcagatctgcgttgtgtgcggcgtcgaccgcgtcgccctctgcgccatcgttcggcggaccgactccggccacgtcgagtatcaagggttctagggatccaacaccagctgctacgtctgatgtaggctgggagacggactcgtttgatgtcaatctcggttga

SEQ ID NO: 3513 - protein, 617 aa, Myceliophthora thermophilia
MTATDLSWSSSKGASRAGTQSRPRAIPDPAIPPSSPSTVAQVSAEGESTMPPNNDPNSRETLAVHTSLLFDPIQKSFLKNVSVEVNTKTGAIARLYQRDSSHLPGPLSEHDIDLRGKVVLPGFVDSHTHIFLHSDKYFPLLHSPLPLTRGGRLGPRPILLSTILTWNQTDHNPIRERLHSHQMRDESPVERTVRAVNHARAALLAGYTTYRDLGTEALGNADANLRDCINRGLTPGPRLLVATEALASNGSYEIRTENRLARGSAVGLTLPRASDPADGVWAVRAAVRRRVGEGADVIKFYADYRRRVMRFPPDTEGPGGRLLFPPDRRERNPALPLYSQEEMDAIVAEARLADVPVAAHAAETSTALMAVRAGVTTVEHIFADTSRCRDEMVAEMAGRGTIWVPTLSTAEEGFDEHKFECCKRAVKEAFDRGVRLAAGADTGVFNHGRNCREMEIMIEAGIPVEDVLVAGTYTGWHACGGDASGFRFGWWDEGNRADIVALDADPREDPKAFRKVSFVMKDGLVWKRDGRPVDAFPATQWPEEEAAESAEESGTLREPAAIPLRSALCAASTASPSAPSFGGPTPATSSIKGSRDPTPAATSDVGWETDSFDVNLG

SEQ ID NO: 3514 - DNA, 1596 bp, Myceliophthora thermophilia
atggcatccgccagcgacgagcagcagcagcaggatcctcagccaatcaagcaagaaccggtggctgaaggagagcctggccattctttgcccgacatgtctcgttccgacaatagtcaggctccgcaagatgctgccgatggcaacgaccacgagatgggcgacaacaacgacaacaacaacaacaacaacaacgatggcggcgccgccgtggggagcgcagccagcacagcgtctaagagtgtcgcttccagcaacaacaataacaacaacaacaacaccaaaaagaagaagggcaccgctgccgccgtcaagggcccttcgaaacgcgggcgtcccggcggcgccaagaagaccaagggcggcggaaccaaaaaggcgaagacggatgccacggcaaggcaggcctgcggcgacggcggcaactcgagcgagtccgacaacgggccctactgcctctgccgcggcccagacgatcaccgcttcatgatcgcctgcgaccggtgcgaggactggttccacggcgagtgcatcggcatggacaagcacacgggcgagaacctggtacaaaagtacatctgtccgaactgcaccgacggcggccggtactcgacgcgctacaagaagatgtgctcgcttgccggctgcaacaatccggcgcgcatctacgactcggcccgtcccagcatcttttgctcgtccgagcactgccaggcctggtgggagcagctcatcgccaccctgccgcgaaccaaatccggctcggacgccgacgagctgacccaggaggagttcatgggcctgctcgacgcctcccgcacatcctcctcgccagacgacacgcgcccctggcgcctcggcaccccgccgttctccacgccgtccaacttctgggacctgcccgcctcctcgcacgcgctcacgccggaggagcaggagttcctcaccgcgtccgccacggcccgctaccagctcggcgaggagatcgtcctctgcaagaagatgctccagctgatcgagatggccctgaagcagcgcgaggcggccatcgccgccggcaagggcaccgccaaggacctgtgcggctacgactcgcggctcgacacggtcggcgccacccgccagttcgccatgttcctccagaccccggaaggcgaggcggccctgtccaagttcggcaccaccgccacgacaacaacgacaacgaccaccaccaccaccaacggtaccaccaacggtaccaccaacggtaccaccaacggcaccaccaacggcaccgccgcggtgaacggagccgcctcggactcgatcccgaccaacgcagtcgccgccgcggccggcgccagctccatgcccggcagcgatccggacttcccttacatgtgccccaagaagaagtgcaagccgcacaacggctggagcgccatcctcaccaagagcgtcaagcgcgacatcaaggagctcgcggcgcaggccaaggagatgctcgatgccgagcagcgcgtgcgcgacggcgccgccggccggttccggcggcggatgaaggaggggaacagggtcatcgtcctctccgacggagcgatggacggctcatga

SEQ ID NO: 3515 - protein, 531 aa, Myceliophthora thermophilia
MASASDEQQQQDPQPIKQEPVAEGEPGHSLPDMSRSDNSQAPQDAADGNDHEMGDNNDNNNNNNNDGGAAVGSAASTASKSVASSNNNNNNNNTKKKKGTAAAVKGPSKRGRPGGAKKTKGGGTKKAKTDATARQACGDGGNSSESDNGPYCLCRGPDDHRFMIACDRCEDWFHGECIGMDKHTGENLVQKYICPNCTDGGRYSTRYKKMCSLAGCNNPARIYDSARPSIFCSSEHCQAWWEQLIATLPRTKSGSDADELTQEEFMGLLDASRTSSSPDDTRPWRLGTPPFSTPSNFWDLPASSHALTPEEQEFLTASATARYQLGEEIVLCKKMLQLIEMALKQREAAIAAGKGTAKDLCGYDSRLDTVGATRQFAMFLQTPEGEAALSKFGTTATTTTTTTTTTTNGTTNGTTNGTTNGTTNGTAAVNGAASDSIPTNAVAAAAGASSMPGSDPDFPYMCPKKKCKPHNGWSAILTKSVKRDIKELAAQAKEMLDAEQRVRDGAAGRFRRRMKEGNRVIVLSDGAMDGS

SEQ ID NO: 3516 - DNA, 1506 bp, Myceliophthora thermophilia
atggatcctccgtcagcttcgtccgaaaacacttccgccctggtaaccttccgcccagccgatctgaggcagctcggtctcttcatcgtcattgaactccctccgggggttgacgacaaccgcactaccaacacgttgtgctgcacgtcccatctctccccgagtaatacgggggttgagctgccgcccacaaggacccgggttgttgtcgggcgggcgagagggttcaagaccgacgtcaaggttggaggttcgggtctggagccgcctccctttgcgtttgcttttgacatcgacggcgtcctgcttcacgtcgccaagccgattcccggggctgctgaggtgctccggttcctgaacgactacaacatccccttcatattgctcaccaacggcggcggcaagcacgaaagggaccgtgtccgggatctcagcgagaaactgggcgtccagctgtccacagacaactttgtccagtctcacacgcccttccaggagcttctcgaagggccggacagcctgcgggacaagacggtcctggtgacggggtccgactacgagaagtgccgttccatcttcaaggaatacggtttccaaaatgtcgtgactccagccgacattttcgccgcagacccgaccatcttccccttccagtccgcttcctcgtacccccacccgagccagcccctccccaagccgctctacaacaagccgaccctcgaccgggcatccctcccctcacatctcaagatcgacgccatctttgtcctcaacgacccccgcgactgggcgctcgacacccagatcatcaccgacctcctgctctcccacgccggctacctggggacctactccccgctcaacggcaagggcaacggcgacaacggcggcggctggcagcaggacgggcagccgcggctctacttcagcaacgccgacctgctgtggagcgcgggctaccacctgccgcggctgggccagggcgcgttccaggctgcgctggcggggctctggcggcgcatcacgggcggcgccgccgagctgcggcgcaccagcatcggcaagcccttcgccgagacgtaccgcttcgccgagcgcgtcctggccgcccacaggcgcgaggtcctgcgcgccatgggccatcatgtcctccactaccagcaccaccaccagcaccgacaggatcctcccgctgatctcgctcccgatggtggcagcggcggcggcggcgacaagggcggggaggcggcgctgcggcgggtgtacatgatcggggacaacccggagagcgacgtcgcgggcgccaacgggtacgccagcccggaggggaccgagtgggtgccggtgctggtccggacgggcgtgtggagcgaggcgagggggggtaagctggaggggcggttcgagccgaggacggtggcggacgacgtgacggcggcggtgaggtgggcgctcaggagggaaggatggcaccgttgtgtgacggaggacggggagctacggtga

SEQ ID NO: 3517 - protein, 501 aa, Myceliophthora thermophilia
MDPPSASSENTSALVTFRPADLRQLGLFIVIELPPGVDDNRTTNTLCCTSHLSPSNTGVELPPTRTRVVVGRARGFKTDVKVGGSGLEPPPFAFAFDIDGVLLHVAKPIPGAAEVLRFLNDYNIPFILLTNGGGKHERDRVRDLSEKLGVQLSTDNFVQSHTPFQELLEGPDSLRDKTVLVTGSDYEKCRSIFKEYGFQNVVTPADIFAADPTIFPFQSASSYPHPSQPLPKPLYNKPTLDRASLPSHLKIDAIFVLNDPRDWALDTQIITDLLLSHAGYLGTYSPLNGKGNGDNGGGWQQDGQPRLYFSNADLLWSAGYHLPRLGQGAFQAALAGLWRRITGGAAELRRTSIGKPFAETYRFAERVLAAHRREVLRAMGHHVLHYQHHHQHRQDPPADLAPDGGSGGGGDKGGEAALRRVYMIGDNPESDVAGANGYASPEGTEWVPVLVRTGVWSEARGGKLEGRFEPRTVADDVTAAVRWALRREGWHRCVTEDGELR

SEQ ID NO: 3518 - DNA, 4755 bp, Myceliophthora thermophilia
atgcatccctccattctagacaccagcatcatcgacttgctcgaggccgacccgcgaccgtccctgatcgtcgccctgacccctcacccgcccaccgtcgtctacacgaacccggcgttcgcagcctattcgtccctcctggacctgatcaccgccaagggcgacgattccgcgccgctgtgggaatggattaccgggggaacgtatagcccgacccagccgccttcggaggccccgccaaacagcagccgggcccccgccgccgcgtccttctcctattccaacatctactggacccgatcggtcgtccatgagcagatggtggtcgtgggtgcaaacgagcaggtcccgccgtctcagccgcgcgacctgctgctgccgaggcgcatcgtgcccgtggagaacgaagcgggaaccgcggcggccgagacctcggtcccttccatcccggttctcgatgtcgaatcccgccccaagtccaccccggccgcattgccggtcaacccaaaggagcggccggagaggccgccctcccgtgcagaggccgtgcagtccgtcggccggacaatatccgagcccgcgtggatattgcccgacaccaccaccccagagcaacgcccgtttctcgacgacatcaacagcgtggactgggcccagacgccgctcggccccatgcggagctggcaccgcaagcttgacgagaccatcaaccagatcctcgtcgacagccggcccatcgccgtctactggggcccgtcctacatcaccgtgtacaacgaagccttcagcaagctctgcgggtcaaagcacccttccatgcttggcatgccggttcaggaagcgtgggccgaggcgggccagcgcctaagggaaaccatgcgcaccatctccgcgaacacgaagggcgccgtcgaggatgagtggcgattctttgtcgagagagagtccgaggtcgagggcggtgaaccctggctcgaggagacgtatctgaggtggtccatgattcctatcgtggaaaacaacgagtgccttggcttcatgcaccccgtcgccgagacaacgagcgtgcgtctctgggaaaggcgcatgaatatgctcatcgagcttggcgaggttctggtcacggcaagggacgtcgaaagctactgggagaaggtgatccaggagcttgccgccgtcgaaccgcgctacgatattcccttggcaatcctgtacacggtccaagacgacacggagaccactgatgcatcatcctcctcctcctcctcctcctcctccttgtcctcgtcctcgtcctcgtcctcgttcgccgctggccccgccaagatatgccggcttgccggcactttgggcgtcccagagaaccacccaatagcgcccgagaccattaacctgcgagccaacagcgagcctcttgcctcctccttcagtcgtgccatcgatgcgccgcatcccattctgctgcagacaagcgacggtacgcttccccaagagctcctcgagggactgcagtggcgaggctttggcgacccctgccgagctgccgtcatctgccccatccgaccgaccaaggaagagagcgtgatgggattcctcctcctgggcctcaaccctaggcgtccgtacgacaacgactaccgccaatacatttccctcctgagccagaagttggccacctctttggcctccattgtcctgctcgaggaggaggctcggagaggccggagcgctgccgagcaggccgcgttcgaccaggccatgctcaaggaaaagctcgaggtgcagaccaaggaggccaatgagtcgctgcagatgttcgaggccgtcgccgagttcgtccccgtcggcatgagcttcggcgatccggaggggaacatcacgtacgccaacgatgcctggtacaagatcaccgggtaccccgggaccgggccagtggccaaccacggcttcctctcctgcgtcaaagaggaagaccacgagatcatcatctccgagtacgaaaagctcaagaccgtccgcaacgtcgagtttgagtttcgcgtgaggtgccaggatgacgcagccgagggaggagacccctcgccgcccctggcgcgcacgtcgccgagctttgagaaggaggacatcgacctcgtctcgctggaggccgtgaaagaacgccacgtcttggccagtgctagggccgaatatgcggccgacgggagtttggtgcgcgtgctgacctgcctgacggacgtcaccccccagaagagggtggccggcgaggctctgcgccgcgcacaacaagccgagaacctcaagcgcatggcagagttcgccaccgtcggcctgtacgacatggacctcgacgggcgcctgctcggtgccaacaccgtcttcttcgagatgtgcggcttgcgcaaggtcgacccggccgtggtcgacgtgaggccttggcagagctgcgtgcacaaggaggacatctccgtgctcgtcgagaagctcgagaagatggtgcgcgaggacaaggtgcagaacgtcgaggtcaggctcaacaccacctggacggccgacgacggctcgggccgcaaggttgtcgtgccgcgctgggtccaggcgaccctgctcccggtcaagacgcccgaggggaagattcagagctttaccggctgcctcaacgacgtgtcgctgcagaagtggcagttggattgggaaaaggagcggaaagaggaagccatcgagtccaagcggcagcaggagaacttcatcgacatgacgtcgcacgagatgcggaaccccctgagcgccatcatccactgcgcggacgccatcaccgcgacgctttgccgcgtccaagagcttctcgacagcagtggccttggtggcgctggcggcggcggcggcggtgttcccgatcttgccaggaaggaagcggccgaggcgggcatgggcgaggcgaacgaggattgggcgatcgaagcccgggaacttgtggacaactgcatcgacaacgccgagaccatcgtcacgtgcgcgcaacaccagaagcgcatcgtcgacgatatcctgacaatgtcaaagctggattcgagcctgatctccatcaccagggtcatggttgacccaatcaagatggtcaaggaggccctcaagatgttcgaggtggaagctcggcgggtcgacatcaacctgagcatggttgtcgacccgtgctaccacgagctcggcatcaagtacctcgttttcgacccgtctcgtctgaagcaggtcctgatcaacctgctcaccaacgcgctcaagttcaccaagaccgggccgaccaggaacgtcacagtagccgtgagcgccagcctcaccgagcccaccgaggccaccagcaaggtatccttcatcccgcgttcccaggagtccctgggggaggtgatccacgaccacccggtccccgtcgaccacgctaacccggtgttcctgatgttcgaggtcgaagacacgggcgagggtctgacggaggaggagaagaagagtctcttccaacgcttcgtccaagcctcgagccgcacccacgtcaagtacggaggttccggtctcggcctcttcatcagccgaaggctggccgagctacagcacggctccataggtgtcaggtccgaaccgggtgtcggcagcaccttcgccttctacatcgaggcttaccggccaaccgaggaggccctgcgcgaggcagaggccagcgggaccctttccgacccagccgtatcggacctgcgagcgaacgccagcttgagcagaaggggaagcaacaggcgcgccatcagcaccagcacgctcaccagcgagtctaccatcgccacgccaaccacctcgggcaccagccctaccgccaccgcggcagtgacccccaccagcgagactggtgggagcccgaccccagtggcgtcacccgcaccgcagatcacgggtgtcttggttgttgaagacaacctcatcaaccagcagatcacccgccgcggtctgctcagcatgggcttcaccgtcgatgtcgcgaaccacggtatcgaagccctcgacaagctacgccgaacggaccgctatcaccctgccacctcttcctcggcttccaccactccggaagcgggagcgggagcgggagcgggagcgggtgcgggtgcgggagggtcttcattccccttcccctctagcgcgagcagtctgtcctccaccaccaccaccaccatcaccaccaccaccacctcctcctcctcctcaccattgccactgccaccgccgccgctaccagcaccagcatcatccgcccagtccataggcttcagcaataccagcagcgccctgacgccgcccgcacagcccttcccactgtcgatgatcctgatggacattgaaatgcccatccaggacgggctcacgtgcacccgcaatatcagggagctggaacgcgcgggcaagattgtcggagggaggatccccatcattgccgtcagcgccaacgccaggatggagcagatcctggaggccaaggaagccgggtgtgacgatgtgctggtgaagccgtatcgcatgcccgagctgctggagaggatgaagacggtgatgggaaaagtggttggttccgaaggtgagaaggcgccggagcgtgagagcgcggatactcctgctaaggatgctgcagaaggcctgggggttatcaagatggaggggccgacgaaggaggaggaggaggaggagggagagggagatggtatagggatagtgaattga

SEQ ID NO: 3519 - protein, 1584 aa, Myceliophthora thermophilia
MHPSILDTSIIDLLEADPRPSLIVALTPHPPTVVYTNPAFAAYSSLLDLITAKGDDSAPLWEWITGGTYSPTQPPSEAPPNSSRAPAAASFSYSNIYWTRSVVHEQMVVVGANEQVPPSQPRDLLLPRRIVPVENEAGTAAAETSVPSIPVLDVESRPKSTPAALPVNPKERPERPPSRAEAVQSVGRTISEPAWILPDTTTPEQRPFLDDINSVDWAQTPLGPMRSWHRKLDETINQILVDSRPIAVYWGPSYITVYNEAFSKLCGSKHPSMLGMPVQEAWAEAGQRLRETMRTISANTKGAVEDEWRFFVERESEVEGGEPWLEETYLRWSMIPIVENNECLGFMHPVAETTSVRLWERRMNMLIELGEVLVTARDVESYWEKVIQELAAVEPRYDIPLAILYTVQDDTETTDASSSSSSSSSSLSSSSSSSSFAAGPAKICRLAGTLGVPENHPIAPETINLRANSEPLASSFSRAIDAPHPILLQTSDGTLPQELLEGLQWRGFGDPCRAAVICPIRPTKEESVMGFLLLGLNPRRPYDNDYRQYISLLSQKLATSLASIVLLEEEARRGRSAAEQAAFDQAMLKEKLEVQTKEANESLQMFEAVAEFVPVGMSFGDPEGNITYANDAWYKITGYPGTGPVANHGFLSCVKEEDHEIIISEYEKLKTVRNVEFEFRVRCQDDAAEGGDPSPPLARTSPSFEKEDIDLVSLEAVKERHVLASARAEYAADGSLVRVLTCLTDVTPQKRVAGEALRRAQQAENLKRMAEFATVGLYDMDLDGRLLGANTVFFEMCGLRKVDPAVVDVRPWQSCVHKEDISVLVEKLEKMVREDKVQNVEVRLNTTWTADDGSGRKVVVPRWVQATLLPVKTPEGKIQSFTGCLNDVSLQKWQLDWEKERKEEAIESKRQQENFIDMTSHEMRNPLSAIIHCADAITATLCRVQELLDSSGLGGAGGGGGGVPDLARKEAAEAGMGEANEDWAIEARELVDNCIDNAETIVTCAQHQKRIVDDILTMSKLDSSLISITRVMVDPIKMVKEALKMFEVEARRVDINLSMVVDPCYHELGIKYLVFDPSRLKQVLINLLTNALKFTKTGPTRNVTVAVSASLTEPTEATSKVSFIPRSQESLGEVIHDHPVPVDHANPVFLMFEVEDTGEGLTEEEKKSLFQRFVQASSRTHVKYGGSGLGLFISRRLAELQHGSIGVRSEPGVGSTFAFYIEAYRPTEEALREAEASGTLSDPAVSDLRANASLSRRGSNRRAISTSTLTSESTIATPTTSGTSPTATAAVTPTSETGGSPTPVASPAPQITGVLVVEDNLINQQITRRGLLSMGFTVDVANHGIEALDKLRRTDRYHPATSSSASTTPEAGAGAGAGAGAGAGGSSFPFPSSASSLSSTTTTTITTTTTSSSSSPLPLPPPPLPAPASSAQSIGFSNTSSALTPPAQPFPLSMILMDIEMPIQDGLTCTRNIRELERAGKIVGGRIPIIAVSANARMEQILEAKEAGCDDVLVKPYRMPELLERMKTVMGKVVGSEGEKAPERESADTPAKDAAEGLGVIKMEGPTKEEEEEEGEGDGIGIVN

SEQ ID NO: 3520 - DNA, 348 bp, Myceliophthora thermophilia
atgcggacaacacgactgcgtaatccatacggattacggacggaccctgaactcagttccgacgtagacacgaggcattcgatcaaagaaccctacggagtaaccccccaagccagctccaagagccgcgaatcctcattccaagacacacaccgcccggcaagcgctccagtcagctcaaacctattgtttttaagccgacaactggcggtgtactgtactgtatgtatgtactgttgtaggaactctaactgggaccaaaactacgggcccggcagaaacgttccccgccccgaagcgaaggcgaacgtcgaaaagcaagaccgggaccgctcgtcccaggattag

SEQ ID NO: 3521 - protein, 115 aa, Myceliophthora thermophilia
MRTTRLRNPYGLRTDPELSSDVDTRHSIKEPYGVTPQASSKSRESSFQDTHRPASAPVSSNLLFLSRQLAVYCTVCMYCCRNSNWDQNYGPGRNVPRPEAKANVEKQDRDRSSQD

SEQ ID NO: 3522 - DNA, 1638 bp, Myceliophthora thermophilia
atggcagtcaaattgttcttttttttaaagaagaaaaaaaatatccccacgcccaccactccttcgctaactgaacccgcgcagatatctgacctcaacaatgtgccgcttgtgtcgggggtgtccatggtcaagtggcacctcccacatagcatacacggggagcatcgcggacggacgcaaaagtgccccattgtgaaccacagggtcgagtacaactactccaagatcgtctcggtccgcatcggcatcgaccgcaacgacagcctgaacgagtgccccatcgagttcgaggtcgtgcaggagttcagcgccggcggcgtctcgggcgccgcggggcgagacgagaagatcaccctcggcaccgtccgcctcaacctcagcgagtatgtcgaggagagcgaggcggtgttgcgcgacggccgcacggccaacgccatcaaggaggctctcatgtcgcccgttcaaaagtcgtcgacccaccgccgccagcgcagctccctgagcaacgccggcctcccggagaccgatccgagccctcggtcgtcgcgcgacgaggaacccccggagggcgagatccaggacggcgtcgtgcggcgctacctgatgcaggacagcaagatcaactcgacgctcaagatcagcatcctgatggtgcaggtcgacggcgagcgcaactacgtcgcgccgccgaagtccgcccccgtctttggcggcatcgccgggttcgtcgccggcgacgccttcgagcccgtcgacgtcggcgccgccaccaccccgggccacccgccctcgtccttcaccggcaagtcgcgcgacgccttcgaggtccaggacatgtaccgccgcgccctggccgccagctgggcgagccagcccggcgagctgtcggccgaccagtgcatcgagaacatcttcagcggcggcgagggcttcgagccgcctccggccgccccctcctcctcctcccacgcgcggagccactcgcgccgccacaccgccatcgccgggcatggcaccggcgccggcggcggcggcggcagcgggacttcggggatggacggcgacacctctcccagccgggggggaggaggaggaggaggaggagggaggagaaggagaaggaggggagggggagggggagtgggcggccgggggcgctacccgccgcaagaggacagcggctcggtgtcggacgacgaaggggaggagagcggcggcgacgtgatgggcaccctccggccgcgcgacgtcgcccggctgcagcggcaccacctgcgcgagcagagcgtcgcgagcgaccggagcgcggccacggtgctcgtggtcggcggcggcggcggcggcagtggagtccgggatctcggccgcgagtcgagccgcggcatcgggctcccccccagcggcccgctccgcgagccgttcccgtccttccaccgccgcgaggagagcaagatcacgcacgccggcgggggcctgcgcagccggagctcgagcctcgtcagcgtggccacggcgaccacgctcggcagcgacagggagagggggagggaagggttcaagcgcgccaaggaggtggacgagttcgaggtacgggaggacttggttgcttggaccgttccgggatctcgatattag

SEQ ID NO: 3523 - protein, 545 aa, Myceliophthora thermophilia
MAVKLFFFLKKKKNIPTPTTPSLTEPAQISDLNNVPLVSGVSMVKWHLPHSIHGEHRGRTQKCPIVNHRVEYNYSKIVSVRIGIDRNDSLNECPIEFEVVQEFSAGGVSGAAGRDEKITLGTVRLNLSEYVEESEAVLRDGRTANAIKEALMSPVQKSSTHRRQRSSLSNAGLPETDPSPRSSRDEEPPEGEIQDGVVRRYLMQDSKINSTLKISILMVQVDGERNYVAPPKSAPVFGGIAGFVAGDAFEPVDVGAATTPGHPPSSFTGKSRDAFEVQDMYRRALAASWASQPGELSADQCIENIFSGGEGFEPPPAAPSSSSHARSHSRRHTAIAGHGTGAGGGGGSGTSGMDGDTSPSRGGGGGGGGGRRRRRRGGGGGVGGRGRYPPQEDSGSVSDDEGEESGGDVMGTLRPRDVARLQRHHLREQSVASDRSAATVLVVGGGGGGSGVRDLGRESSRGIGLPPSGPLREPFPSFHRREESKITHAGGGLRSRSSSLVSVATATTLGSDRERGREGFKRAKEVDEFEVREDLVAWTVPGSRY

SEQ ID NO: 3524 - DNA, 2427 bp, Myceliophthora thermophilia
atgccttacaacaccgtccgcgcccgcgcccgctcccccacgccatcgcacctggttcttctaggtcatgtctcccgagacggtggcacgcacaagctcctccaagacggccacagaggcgcctcgaccatgagtcccatggcccggccctcgctgctcctggacgagccggtcgcaggttggaagctccagctgcccgaactcgcagatgccgactacgtccgcgaggtcctggcccggtccgacggcgcgaccgaggccgacatcgagcacgagttggtgtccaaggccgccgccctgcgcatcgagctgcccgcgtcagcgtttccgtttccggatccgcaagagcgctcgcacgagccgcgggcgcccggcgtgcagcagcagcagcagaacagcgcggcctcgacgggctcggacggcggcagcgcagattgttccgcgacgctgcagatctcggaccgtggggcggcgagtcccggtacaccagcaacagcaacaataacaagggaaacaacaatgacaagggaagcaacggcaacgagaaggcggtcgaggagcctcagcttctcccagtacgagaggtacatcagccaggtcgatcccgcgctcgaacagtcaaagttccagaaatcggagccggccgggggcatcgctgcgaaaccgagcgggaagaagggtgtcaggggtatcactcgcagcatcacggccaggttgaggaggagaaagccgagcccggatcagccaatgccttgtatttgctgtcgcgaggacttccttgtcggcaacacggccctgcacacgataccttgcggtcattgctactgccgcgactgccttaccatcatggtcgagcagtccatgctggacgagtccaagatgccgccgcggtgttgcacccagccgatccccgccgccatcatcaagacggtcctcccgagggagaagcagcagctcttcctcaaggcggtggtgcagtacagcacgccctgggaggcgcgcgtcttctgcccaaacacttcgtgcggcgagttcatcccgcccgcgagcaagcccgacaccaagcacccgttcgagacgctctgccagtcgtgccagacgcgcgtctgcaccatgtgcaagcgcagcgcccaccagctgggccaggactgccccgaggacaaggaaagcgacgcggtgctccgcatgggcgagcggtccggctggcgccgctgctacaagtgccggtccctggtcgagctggcccaggggtgcacccacatcacgtgccggtgcaaggcgcagttctgctacatctgcggcgccgtctgggaccctgccgtcggctgccccaacttctgcaacggcgaggaggagatggagcgccgccgcgtggaggaggaggcccggcgggccgagctcgaggccgagaaggaggcgcgccagagggaggccgaggccgaggagagggagaaggaggacgccgagaggcggacgcgcgagagccccgagttccgggcgctcagggcggagcaggaggccgagagggcccggttcggagcctacgagcggagggtgaaggaggccctgcgggcgcggcagcagcgcaggaaggtcgccctggccgacaagttctcggacctgatggaccgcatgcgcgagcggcacgccaagacggagcagcacctcgaggacctccaggtcatggccgagatcgagctgcaggccagcctggaagagaagcggaagagggtccagatcaagctccgccacatggaagactactgcgcaggcaagatcgcggcctccggcaacgacggcaacgacggcaacgacgaatcatcccccgtcattatcatcaccacaatcaccacaatcaccacatccatcaccaccaacagcaccaccatcatcatcatcattaccttcatcaccatcatcaccatcatcaccatcgccaccatcgccacaagaacaacaacaccaagcccaccaaacccaggcggcgcccccaccagacgccggcagcagcagcagcagcagcagccgtcgcagcatgccccagcgcaagcctgcgcgacggcatggagcggcggcaccggtcgcagatcaacggcctgcgcgagaagcaggccaggagcatgggaggagctggtggggcggcacgagcgggagcgcgaggcgctggccgaccgccgcgccgaggaggtcgaggacctcgcggtccgcttcgccaacgaggaggacgccctcctgcgcaccctcgccgaccgccgcgcccgcctcgcccgccgctggctcctcgccgccgaggtcctccgcgccgagctcgaggcccgccaccgccgcaggtttgcccccatgcccgtcaccccctggccggacgaggaggaggaggaggaggaggaggagcctcgccgcatggccgtggaagtgggttgcgcgtaa

SEQ ID NO: 3525 - protein, 808 aa, Myceliophthora thermophilia
MPYNTVRARARSPTPSHLVLLGHVSRDGGTHKLLQDGHRGASTMSPMARPSLLLDEPVAGWKLQLPELADADYVREVLARSDGATEADIEHELVSKAAALRIELPASAFPFPDPQERSHEPRAPGVQQQQQNSAASTGSDGGSADCSATLQISDRGAASPGTPATATITRETTMTREATATRRRSRSLSFSQYERYISQVDPALEQSKFQKSEPAGGIAAKPSGKKGVRGITRSITARLRRRKPSPDQPMPCICCREDFLVGNTALHTIPCGHCYCRDCLTIMVEQSMLDESKMPPRCCTQPIPAAIIKTVLPREKQQLFLKAVVQYSTPWEARVFCPNTSCGEFIPPASKPDTKHPFETLCQSCQTRVCTMCKRSAHQLGQDCPEDKESDAVLRMGERSGWRRCYKCRSLVELAQGCTHITCRCKAQFCYICGAVWDPAVGCPNFCNGEEEMERRRVEEEARRAELEAEKEARQREAEAEEREKEDAERRTRESPEFRALRAEQEAERARFGAYERRVKEALRARQQRRKVALADKFSDLMDRMRERHAKTEQHLEDLQVMAEIELQASLEEKRKRVQIKLRHMEDYCAGKIAASGNDGNDGNDESSPVIIITTITTITTSITTNSTTIIIIITFITIITIITIATIATRTTTPSPPNPGGAPTRRRQQQQQQQPSQHAPAQACATAWSGGTGRRSTACARSRPGAWEELVGRHEREREALADRRAEEVEDLAVRFANEEDALLRTLADRRARLARRWLLAAEVLRAELEARHRRRFAPMPVTPWPDEEEEEEEEEPRRMAVEVGCA

SEQ ID NO: 3526 - DNA, 783 bp, Myceliophthora thermophilia
atgtctgaggctcggcagcgggaactcgaatccctcctcgaaaagggcgtcataagcgattccgccttcgactcgatcaacgccctcctcccggccgagtcccccctctcgggcccgggaccccgaagcaacaacccgaccccggcgccgcccgccgactccccggcatcgacggcggcgccgccctcgtacgctcagtccaccgcctccccgccatccctccccgcgcgcaacaactctgccgcgccgccgcagaagcagcagcagcagcagcagcaaccgccgccaccgccaccgcagcccgagaagcccgtgctggtctacgcccgggcgctctaccgctacacggccggcgacgcgcgcgactgctccttcgagcgcgatgaccgcctcgccgtgcacgagtacatgaacgccgactggtggctcggcaagaacctgcggaccggccaggagggcatcttcccgcgcaactacgtcgtcgtcgtcgaggaggcccaccagaaggccgccgcccagccgccacccgcgccggtcgcgtcgtcgtaccagcagccgcagtacgccgcgcccgcctccgcctccgggtatcccgtctcgcccgtccccgtgcacgggtactcggccgcgccgccgccggggcagcagcagcagggggaggagagcggcggggggagcaagctgggcgagcacggcaagaagtttggcaagaagctggggaacgcggccatctttggtgcgggcgcgaccatcggcagcaatatcgtgaactcgatcttttaa

SEQ ID NO: 3527 - protein, 260 aa, Myceliophthora thermophilia
MSEARQRELESLLEKGVISDSAFDSINALLPAESPLSGPGPRSNNPTPAPPADSPASTAAPPSYAQSTASPPSLPARNNSAAPPQKQQQQQQQPPPPPPQPEKPVLVYARALYRYTAGDARDCSFERDDRLAVHEYMNADWWLGKNLRTGQEGIFPRNYVVVVEEAHQKAAAQPPPAPVASSYQQPQYAAPASASGYPVSPVPVHGYSAAPPPGQQQQGEESGGGSKLGEHGKKFGKKLGNAAIFGAGATIGSNIVNSIF

SEQ ID NO: 3528 - DNA, 1134 bp, Myceliophthora thermophilia
atgaaaaagacaaagtgcgatggagaatttccttgcaagaggtgtaaagacgacgggttaatatgcacggctgggactcgaaagaagaccgagtacaaacaactaccgccggggtacgccgaggtgctggaaaacacgcagtttgtcctgattgccacggtccagaagctctactcgatggtgcggaacggagagccctgggacctgggggagcccgaattgaacgaccgtggtcaacctgtcattcacaacgttgccgccaaactcggctgtttacgacccaacagcgacctggatcttcccgttcattccatcttccccgaggatgaggccgggatggcggagctggctcggcaattgcaggagcacgctgcggcatcatcagcgtcatcgtcatcgtcatcatcatcatcgtcgtcgtcggcatcagccggcgacgcatcgcagaacagcagcggtagcaatagcagctccgggcaagagaccgagtctaataccgcctgcaaccggacagatcgagccagttcctctgccgcctcagacgccgagcattcggatttcgatctcgaacccgactaccgcagggccgcgttcggcaccgccagcgccgtcagcttgtcgcccgccagcctcagctaccccgactttgacctctccccgccgcccgcggcgccgtcggacgggttcccgccgagccagcagtctcccaccgtccccgcggctccgaacaacttccagtggatgagccggccgtcgtcgatggatttcacgacccagcaattgtggatggcgagtcaaggtttcgtgggcacggacatgatctcctcgggagtcctgggatctaactacacggccaagcccaccggcttctccggaaggggtgataggagaacggctgacttgacaaagccgtcactgccgttaatgccaaaattcatcaaaaaccgctgcttcctctcgtctctcccatacggcggacctcacatgtctttcttcgacgacgacgacgacgacgacgacgacgacgacgatgacgatgtgcacccctgcctcagccctacggctacaacgatgcgtaacctggcggcggcccagcccaggtgcatgacgacagcattattgttcaattcatga

SEQ ID NO: 3529 - protein, 377 aa, Myceliophthora thermophilia
MKKTKCDGEFPCKRCKDDGLICTAGTRKKTEYKQLPPGYAEVLENTQFVLIATVQKLYSMVRNGEPWDLGEPELNDRGQPVIHNVAAKLGCLRPNSDLDLPVHSIFPEDEAGMAELARQLQEHAAASSASSSSSSSSSSSSASAGDASQNSSGSNSSSGQETESNTACNRTDRASSSAASDAEHSDFDLEPDYRRAAFGTASAVSLSPASLSYPDFDLSPPPAAPSDGFPPSQQSPTVPAAPNNFQWMSRPSSMDFTTQQLWMASQGFVGTDMISSGVLGSNYTAKPTGFSGRGDRRTADLTKPSLPLMPKFIKNRCFLSSLPYGGPHMSFFDDDDDDDDDDDDDDVHPCLSPTATTMRNLAAAQPRCMTTALLFNS

SEQ ID NO: 3530 - DNA, 390 bp, Myceliophthora thermophilia
atgcccctcgagcgaaggcaggattatcattcttcaacgaaactaagaccgaaccgcatcttttgcgacaaggaagaggtctgtcagcggatcgcctcccattggaaggaacacatccgagaagaagcgaaacagctcatcgtcgattggccgtgggacagaaagtacttcgacgacaacgacgtcgtcgtaagagttaagatcagaatcctggctggcggctccgatctcgaggggatcgtccctgcaaccatcgcggccatggcatggacgaagggcgagttccctgcgtcttggcaccacgcactcgctcagctcccggggccgacggagctgcggctgcggtcgttcttcaacgacttctccactccgcatggaaacccaatctag

SEQ ID NO: 3531 - protein, 129 aa, Myceliophthora thermophilia
MPLERRQDYHSSTKLRPNRIFCDKEEVCQRIASHWKEHIREEAKQLIVDWPWDRKYFDDNDVVVRVKIRILAGGSDLEGIVPATIAAMAWTKGEFPASWHHALAQLPGPTELRLRSFFNDFSTPHGNPI

SEQ ID NO: 3532 - DNA, 768 bp, Myceliophthora thermophilia
atgtcgaccatgcccgcaacccacggccatagtgaggcctgctgcaacatccctcccgttgtgtcgacgggataccagcccaagggctcgtacaaggaatacggcggcctcaaaacctacacgacgggccctgccgatgccgacaagggtatcgtcgtcatctacgacatctttggctactttgaccagaccgttcagggttccgatattctcgcctacagccactcccagaagtaccaggtcttcattccggattggttcaagggcgagccatgccccattgagtggtatcctcccaacacccctgagaagcagaagaacctaagcgccttcttcggcaagaacccgccccaaggagtggccgatgccctgcctggcttcgttgacaccctcaaagccaagcatcctgagatcaagtcttgggccatcgttggctactgctggggcggaaaggttgtgagcctcatcacctcgagcgattcaaaccccttctccgtcgctgccgagtgccacccggccatggtcgaccccaaggaggcggagaccatcagagtgccgctcattctgcttgcctccaaggacgagcccgagcacaaggtcaagcagtttgaggcgaacctgaagggccccaagcacgtcgagacgttcaaggaccagatccacggttggatggccgcccgctccgacctgtcggacaaccgcgtcaaggaagagtacacccgtgggtacaagacggtgctcgacttctttgccaagaactggccgtga

SEQ ID NO: 3533 - protein, 255 aa, Myceliophthora thermophilia
MSTMPATHGHSEACCNIPPVVSTGYQPKGSYKEYGGLKTYTTGPADADKGIVVIYDIFGYFDQTVQGSDILAYSHSQKYQVFIPDWFKGEPCPIEWYPPNTPEKQKNLSAFFGKNPPQGVADALPGFVDTLKAKHPEIKSWAIVGYCWGGKVVSLITSSDSNPFSVAAECHPAMVDPKEAETIRVPLILLASKDEPEHKVKQFEANLKGPKHVETFKDQIHGWMAARSDLSDNRVKEEYTRGYKTVLDFFAKNWP

SEQ ID NO: 3534 - DNA, 1206 bp, Myceliophthora thermophilia
atggctgaagaagagtttgaaatcgacgtctatggcgactcggccaatgaacacggcgactcaaccaatgatcacggcgacaacgaccatggcaaccatgacgagcatggccatgaccatggcgatgacaccggctacgagggcgaggacggccagaacacaaacggtgaccatcagggccatgatgattatcaggaggaacatagagaagacaacatggacgacggcggcgccgccgacgaccagaaccagtcccacagtcccgccgcccagcgtccccagcagggcgtgaagcgcaaggagggttctgacgagcgcccggtcgaccccggtgccaccacggcgctcatgatctcggagctcaactggtggaataccgacgacgacattcgcggctgggtgcgccaggccggctgcgaggccgagctcaaggacatcaccttcagcgagcacaagatcaacggcaagagcaagggccaagcctatgtggaattcaccacccagcaggctgccactgccaccaaacatcgcattgacgccctgggaaacgagctcaaccagcccggccagaagcggcacattgtcatctactcgtctccgaaccacaaccccttccgcaccctgcccaaggatgcccccaaccgggctgccaaggacgcccagggtcgcgccgtctccggccccatgtacaacgaccgcaacaccaactttggcggcaatcccaactttggcggtttccgcggtggccgcggcggctttaacgggccccggggcggcggcggcatgaaccagggcggcttcaaccgcaactttgccggcgccaacatgaactcgttcaacgccaacaacatgggcttcaacaaccccatgggcggcggcggtttcggcggcggcggcttcaaccgcggcggcatgatgggcggtggtatgcgcggcggtggagccatgcgcggcggccgcggcggtggcggcatgaacatgatgggcggcatgcccatgggcggcggtatgcctatgggcggcatggcgggcccgatggccggcatggggatgatgggaggcggcatgggcggcggtatgggcggcggcatgcctggcttccaaggcatgcagcccggcttcaacccggccttcttcggtggcggcgccaaccagcccaacgagtggcagaaccctcacggcgccaagcgtgctcgcggcgagtag

SEQ ID NO: 3535 - protein, 401 aa, Myceliophthora thermophilia
MAEEEFEIDVYGDSANEHGDSTNDHGDNDHGNHDEHGHDHGDDTGYEGEDGQNTNGDHQGHDDYQEEHREDNMDDGGAADDQNQSHSPAAQRPQQGVKRKEGSDERPVDPGATTALMISELNWWNTDDDIRGWVRQAGCEAELKDITFSEHKINGKSKGQAYVEFTTQQAATATKHRIDALGNELNQPGQKRHIVIYSSPNHNPFRTLPKDAPNRAAKDAQGRAVSGPMYNDRNTNFGGNPNFGGFRGGRGGFNGPRGGGGMNQGGFNRNFAGANMNSFNANNMGFNNPMGGGGFGGGGFNRGGMMGGGMRGGGAMRGGRGGGGMNMMGGMPMGGGMPMGGMAGPMAGMGMMGGGMGGGMGGGMPGFQGMQPGFNPAFFGGGANQPNEWQNPHGAKRARGE

SEQ ID NO: 3536 - DNA, 4617 bp, Myceliophthora thermophilia
atggcttctttggagggaggaacgggagaacctaccggggcagaactctcaatgcagaggtcgagatgggctactcggaggttgacggtaaagagcagctccatgaagcggctctcgttaatgggaaggcggcacaacaggggcgtggcgagcgagaagaagaggacatctggagggaccgacgtctcccgacaggccgactctgacgcgccaaaggatgagagtagcgaggaggaggtgcgcggtaatggctcggaatcgaggcgactcttcttcaacctgcccttgccgcccgagttccgggacgaagacgggcatccaatacagcaatttccgcgaaacaaaattcgaactgcaaaatacacgccactctcgtttattccaaagaacctttttttccagtttcaaaatgtcgccaacatctttttcctcttccttgttatcttggttattttccccatttttggcggcgtgaacccggggctcaatgccgtgcctctaattgttattatctgcgtcacggcgattaaagacgccatcgaagactaccgaagaacgatcctggatatcgagctcaacaatgctcccgtccatcggttgttaggcaaagaaaacctcaacgttagggaggacaatgtgtccgcctggaggaaattcaagaaagccaactcccgctttttcggcgcgatatggcacgcgatcgaggcgctgtggaagaaggagcctcagcttcgccggaactttacgaccgcagaccctcgcatgtcaatcgaaagcagagccacgccgtgggaacccgtcgcctcgccgcgctcgcgccattcagtttcttcggcccatgaagagatccagatgacgcctgtgccgtcgcccctcccgcgcgacccgaacatgcccagtatctcgtccacggtggagaatgaggcggctcttctgcagaaactccagggcgatttgatcaacccggagttgcccgtatccgggcaggcgaggttccacagggatgcatggaagaatctagtcgttggcgactttgtacgcatctacaatgatgacgagcttccagcagatatcatcatcctggccacctcggatccagacggcgcgtgttacgtggagaccaagaacctggacggcgagaccaatctcaaggttcggtcagccctgcggtgtggccggaccctgaagcatgcgcgcgactgcgagcgggcccagttcaccattgagagcgagcctccgcagccgaatctttacaagtacaatggcgccatcaagtggaggcaaagagttccctgggatcccaaagccgaaccgagggagatgtcggagcccatcaccatcgacaatctgcttttgcgaggttgcaaccttcgaaacacagagtgggcgctcggcgtggtcgttttcaccggtcacgatacgaaaatcatgatgaatgccggcatcacgccaagtaagcgggcccgcatcgcgagggagctgaatttcaacgtcatctgcaactttggcatccttctcgtcatgtgtctgatgtcggccatcgcgaacggcatcgcgtggggcaagacggacgcgtcgctgacctggttcgagtacgggtctcttgggggaagtccaggtctgaccggcttcatcacgttctgggccgccgtcatcgtcttccaaaacttggttccaatctcgctatacatctcgctcgaaattgtgaggaccctgcaagccttctttatctacagcgacatcgggatgtactacgacaagattgaccagccctgcatccccaaatcctggaacatatccgacgatgttggccagatcgaatacatcttttcagataagacgggcactctcacgcagaacgtcatggagtttaagaaggcaaccatcaacggccagccgtacggcgaagcgtataccgaggcccaagccggcatgaacaagagattaggcgtcgacgttgagcaggaagcgaaggtcatccgggcggagattgccgaggccaaggtcagagctttgcgcgggcttcgggaactccacgacaacccgtacctccacgatgaggacctgacttttatcgctcccgatttcgtggaggacctcgccggcagaaacggccccgagcagcagcaagcaaacgagcacttcatgttggccttggccctttgccacaccgtcattgcagagaagcagccgggcgacccgccaaagatgatcttcaaagcccagtccccagacgaggcggcactggtggctacggcgcgcgatatgggtttcacagtgttgggcacgagtaacggcggcatcaatgtgaatgtcatgggcgaggacaggcattaccccgtcctgaataccatcgagttcaattcaagcaggaagaggatgagttcgatcgtcaggatgccggatggcaggatcttgctcttctgcaaaggcgccgatagcgtcatttattcccgcctcaagaagggcgagcaggctgaactccgccaagaaacggccaagcatctcgagttgttcgctgtcgagggtcttcgaactctctgcatcgccgagagggaactgtctgaggaggagtatctcgaatttagaagggagcacgaagtggccgccacggctcttgagaatcgcgaggagaagctcgaagaagtcgccgataagatcgagagagacctgatgttgctgggagggactgctatcgaggaccgtctccaagacggcgtcccggacacgatcgggcttttgggtgacgctgggatcaagctctgggttctcaccggagacaaggtcgaaacagccatcaacatcggcttctcctgcaacctgctcaacaacgacctggacctccttcgcatacaggtcaatgaagacgagaccggcctggggaccgaagaggagtacatcgcgatcgccgaggagcaactcaacagcggcctggcaaagttcaatatgacgggcagcgacgaggaactgaagagggccatgaaggaccacgagcccccggcggccacccacgcgcttgtgattgacggtttcacgcttcggtgggtgctcagcgacagcttgaagcagaagttcctgctgctgtgcaaacagtgcaagtctgttctctgctgccgcgtcagccctgcgcaaaaggcggccgttgtctcgatggtgaagaacggcctcgatgtcatgacgctctctattggagacggtgcgaacgacgtggccatgattcaagaagccgacgtcggcgtcggcatcgccggtctggaagggcggcaggctgtcatgtcggccgacttcgccatcggccagttccgcttcttgcagagactggtactggttcacggcagatggtcctaccgccgcctggcagagtcgatcagcaacttcttctacaagaacatgatatggacttggtccatcttttggttccagtgcttcaccgattttgatatctcgtacctcttcgagtacacctacatcctcatgttcaacctcttcttcacatcggtcccggttatccttatgggcgtcttggatcaggatgtgagcgacacggtgtctttggcggtgccccagctctaccggcgcggtattgaacggaaggagtggactcaaaccaagttttgggcatacatgattgacggcgtctaccagtcgatcataagcttcttcattccgttcatcttcgttagtctgacgaccaccgcgtcctcaaatgggctcgacgtcgcggaacgtacgcggctgggcgcctacattgcccatccggccgtgtttaccatcaacggttatatcctgatcaacacgtaccgatgggactggctcatgatccttgttattatcatcagcgatgtcttcatctttttctggacaggggtgtatacgtcattcacgggctccgcccttttctaccaggcagcgccgcaggtctacggggagtttactttctggatgtgcttgatcgtcactcccgctctttgccttcttcctcgcgtcgtggccaagaccattcagaagcagcggttcccctacgacgtggacatcatccgggaacaggccaagcggggcgacttcgcggataccaatgctgctggggcttccgccgtgggagtcatggagggcgtagggggcgggtccaacaagtcctcgacttcgtcgggcaagatatcgggccgcagcaagaaagcgaagcacgcccaatacgcaagcgtcgatgaggacaggcggccgatttatccgccctctgtcgcgacccataacacgcggacgcagaacggcagcgacgggacaacgtacatcatgagccgggcctcggcggagctacagctgcagcggcagcagacacagcgggatgaagagattggaggggagccggagcccgcagccagccggccgtcagtagaccgctacaggccgtcgtacgaccgggtacggcggtctatcgaccgagtccggccgagtttcgaggctagcaatgactttacgtcagcagcgcgcctcagcatgatcgagtcgacgcattcagcccagcagctgccgggtcaacggcggtttaacctgacgacggtgcggaagcgggggctttctgccttctccaagaagagtgcggacccgccggatgaatag

SEQ ID NO: 3537 - protein, 1538 aa, Myceliophthora thermophilia
MASLEGGTGEPTGAELSMQRSRWATRRLTVKSSSMKRLSLMGRRHNRGVASEKKRTSGGTDVSRQADSDAPKDESSEEEVRGNGSESRRLFFNLPLPPEFRDEDGHPIQQFPRNKIRTAKYTPLSFIPKNLFFQFQNVANIFFLFLVILVIFPIFGGVNPGLNAVPLIVIICVTAIKDAIEDYRRTILDIELNNAPVHRLLGKENLNVREDNVSAWRKFKKANSRFFGAIWHAIEALWKKEPQLRRNFTTADPRMSIESRATPWEPVASPRSRHSVSSAHEEIQMTPVPSPLPRDPNMPSISSTVENEAALLQKLQGDLINPELPVSGQARFHRDAWKNLVVGDFVRIYNDDELPADIIILATSDPDGACYVETKNLDGETNLKVRSALRCGRTLKHARDCERAQFTIESEPPQPNLYKYNGAIKWRQRVPWDPKAEPREMSEPITIDNLLLRGCNLRNTEWALGVVVFTGHDTKIMMNAGITPSKRARIARELNFNVICNFGILLVMCLMSAIANGIAWGKTDASLTWFEYGSLGGSPGLTGFITFWAAVIVFQNLVPISLYISLEIVRTLQAFFIYSDIGMYYDKIDQPCIPKSWNISDDVGQIEYIFSDKTGTLTQNVMEFKKATINGQPYGEAYTEAQAGMNKRLGVDVEQEAKVIRAEIAEAKVRALRGLRELHDNPYLHDEDLTFIAPDFVEDLAGRNGPEQQQANEHFMLALALCHTVIAEKQPGDPPKMIFKAQSPDEAALVATARDMGFTVLGTSNGGINVNVMGEDRHYPVLNTIEFNSSRKRMSSIVRMPDGRILLFCKGADSVIYSRLKKGEQAELRQETAKHLELFAVEGLRTLCIAERELSEEEYLEFRREHEVAATALENREEKLEEVADKIERDLMLLGGTAIEDRLQDGVPDTIGLLGDAGIKLWVLTGDKVETAINIGFSCNLLNNDLDLLRIQVNEDETGLGTEEEYIAIAEEQLNSGLAKFNMTGSDEELKRAMKDHEPPAATHALVIDGFTLRWVLSDSLKQKFLLLCKQCKSVLCCRVSPAQKAAVVSMVKNGLDVMTLSIGDGANDVAMIQEADVGVGIAGLEGRQAVMSADFAIGQFRFLQRLVLVHGRWSYRRLAESISNFFYKNMIWTWSIFWFQCFTDFDISYLFEYTYILMFNLFFTSVPVILMGVLDQDVSDTVSLAVPQLYRRGIERKEWTQTKFWAYMIDGVYQSIISFFIPFIFVSLTTTASSNGLDVAERTRLGAYIAHPAVFTINGYILINTYRWDWLMILVIIISDVFIFFWTGVYTSFTGSALFYQAAPQVYGEFTFWMCLIVTPALCLLPRVVAKTIQKQRFPYDVDIIREQAKRGDFADTNAAGASAVGVMEGVGGGSNKSSTSSGKISGRSKKAKHAQYASVDEDRRPIYPPSVATHNTRTQNGSDGTTYIMSRASAELQLQRQQTQRDEEIGGEPEPAASRPSVDRYRPSYDRVRRSIDRVRPSFEASNDFTSAARLSMIESTHSAQQLPGQRRFNLTTVRKRGLSAFSKKSADPPDE

SEQ ID NO: 3538 - DNA, 528 bp, Myceliophthora thermophilia
atggccaagggaaaatccggcggcggtgttcaaaataaggccatttactcgcgcatttccttccttcaacaagcggctgtcaccctcgcatcaatttcggaccccttcgcggatagtgaaaggtccgaggccgcaaatacttcgttctccgacgaacccacttccgttagagctttcaatgtcgttggctccggcagaatgggtctcgacggtatgagcaggcggctagcgaccgatttacgcgcagtctccctcaaaaccaggattcggctcaagccggcagtcaaacggaccatttgcaaattttgcgactccgtactcattgacggacagagctgcacttccactgtcgagaataggagcaagggaggctcgaagccatgggctgacgtgctggtgcgcaaatgccatacgtgtggtagggaaaggaggtacccggtcagcggggcgaggcagaaacggaagaccgagcgagggctcgacggaagcaacggcaactcgcagaaacaaaatcggaaagatgtatga

SEQ ID NO: 3539 - protein, 175 aa, Myceliophthora thermophilia
MAKGKSGGGVQNKAIYSRISFLQQAAVTLASISDPFADSERSEAANTSFSDEPTSVRAFNVVGSGRMGLDGMSRRLATDLRAVSLKTRIRLKPAVKRTICKFCDSVLIDGQSCTSTVENRSKGGSKPWADVLVRKCHTCGRERRYPVSGARQKRKTERGLDGSNGNSQKQNRKDV

SEQ ID NO: 3540 - DNA, 219 bp, Myceliophthora thermophilia
atggatgggttgggggagaaggctgtaatctcgcgcgaacatatgtggctggcgagacgcctgccgacctccgacggtggtggtggaggagaaggagaaggctttgtcaacatggaaggccagtgtattcatgcgccccgcggtgatgccgccgtcgccgtcagcggtggttgtccgccctgctttggaaaccggtctttcttgaacgggaaacagtag

SEQ ID NO: 3541 - protein, 72 aa, Myceliophthora thermophilia
MDGLGEKAVISREHMWLARRLPTSDGGGGGEGEGFVNMEGQCIHAPRGDAAVAVSGGCPPCFGNRSFLNGKQ

SEQ ID NO: 3542 - DNA, 1050 bp, Myceliophthora thermophilia
atgaagaagctccccgccccctccagcacctttgccgccaaaaagtcaaggatcctctcccagctcgcgttgcccgacgaccagtacgccgacgcctcgcccaagggctccgtcgacgccggcatccgcgccctgatcgaccgcatcaacacggcccacgaggggctcgtcacgacgagcagctgcgccgggcgcgtgagcgtctacctcgaggggcccaaggctcctcgtcccccggctcctggcggggcggatgttactgctggtggtggtggtagtggtggcgaggttgctttggagggtgggcggcgcggggatggcgcggcagggagtttgagttcggcggtgggtgggaagggcggaggggagtggttgttcgtgtcgcatgatccggtggtggtagaggagaaggaggaggaggagcggcttcggggtgaggatgaagcgtattatgagaggttgctgttgggcctggagccggcgacgacggcagcggtgagcgggagcggggcacaggatctcggatcggtgacgccggcgtcacggctgattcatttcaaattcgagccaatgattttacatatcttgaccgcctcggtggagcatgcgcagctggtcatccaggcaggcatggaggccggcttccgtgagaccggcgccgttagcctgctagcgcggcaggccggcgaggaggcaacgcccgtggttgcggtccggtcgatgggcttatccttcgagtcgttgatcggggttgagacggacggcgttcgccggctgatcgtgtcgacgcagtatttgaagacactggtgcagatagccaatgatcggtttgtcgagaacaagaagaggatagatagattcagcgcggcgctcagtgaggccttcgcacctccgaagggcaaggagaactgggaggatgcgcagtcgagaagagaacgcaaacgacaggagggcctgaggcggcgagagcagctccggaaagacaagaagaccgaggttgtagacgagtcgcgcgcggactcgatcatacaattaccggagcttgtctag

SEQ ID NO: 3543 - protein, 349 aa, Myceliophthora thermophilia
MKKLPAPSSTFAAKKSRILSQLALPDDQYADASPKGSVDAGIRALIDRINTAHEGLVTTSSCAGRVSVYLEGPKAPRPPAPGGADVTAGGGGSGGEVALEGGRRGDGAAGSLSSAVGGKGGGEWLFVSHDPVVVEEKEEEERLRGEDEAYYERLLLGLEPATTAAVSGSGAQDLGSVTPASRLIHFKFEPMILHILTASVEHAQLVIQAGMEAGFRETGAVSLLARQAGEEATPVVAVRSMGLSFESLIGVETDGVRRLIVSTQYLKTLVQIANDRFVENKKRIDRFSAALSEAFAPPKGKENWEDAQSRRERKRQEGLRRREQLRKDKKTEVVDESRADSIIQLPELV

SEQ ID NO: 3544 - DNA, 1473 bp, Myceliophthora thermophilia
atggctgaggaagttggtgcctctcctcggccgagccggccttccatgaccgcaatgcggagcagttcgttcttgagggagcatcaacaataccgccctccgcccaaacccgacagccactatgggatcgacaccgtcgtcgaggacctccaagcgacatcggtctccgcgcgtgagatctcgccattcaagggaatcccgtcgcccgaaaacccgcccaaggtcgtcgacagcggcgtgagacacgagctgtcgcatccaaactgcactccaaaagccggtgagcagaccgagaggctcgttgcgacgctcttctatcggtcgacggcccctcgtgtctcgaatgcgattccctccccgaagaaggccgctacgccgcagggaagccgatccccctcgcttcgcgctgccgcggccgagtccgacatacctccgaccatggccccgagcagtagcctcgacagctaccccctcgagccgcccgcggccgagcccgaacctctcgaccacctctacggctcctacgtcacgcccatgtgcatcacctccttcctgcacctcatgacgaccttcccgctccccaagggctcgaccgacctcacctcggcgcaccgctgcctcaagctcgacgccagcccggaacagcacccggtggtcgtcgaactgaccctctcccccgcgcccgccaaggactacctctccctcgccgacctgcgcaagcacgagctcatctaccggttcgagcgcgagtggaacgtcgacgtggcgctgcgcgccgacacgctctggcgccggtacccgcgcctggtggtcttcgacatggacagcacgctcatcacgcaggaagtcatcgacctgctggcggccaccatcaaggacccgccggacctggccgcgcgcgtcgccgacatcacgcaccgcgccatgctcggcgagctcgagttcgactccgccttccgcgagcgcgtcaagctgctcgccggcctccccgagaccatattcgaggacctgcgccccgtgctggaggtgaccaacggcgtgcggccgctgctccgcgcgctgaagaggctcggcgtgaagaccgccgtactatcgggcggcttcttgcccctgacgtcttggctggccggagaactggggatcgattatgcccacgcgaacgaggttgtcatcgacgaggcgtcgggccggttgaccggcgaggtgaagggccgtatcgtgggcaaggagcgaaagagggagcttctcatcgagattgccgagaaggagggcattgcgctggagcaggtggtggctgtgggcgacggcgccaatgacctgctcatgatggacgccgctggcctcggcgtggcctggaatgcgaagcccagggtgcagatggaggctagcgctcggatcaacggtgatagcctgctggatttgctgtatctctttggtttcacggacgaggaggttcggcagctcagcgcttga

SEQ ID NO: 3545 - protein, 490 aa, Myceliophthora thermophilia
MAEEVGASPRPSRPSMTAMRSSSFLREHQQYRPPPKPDSHYGIDTVVEDLQATSVSAREISPFKGIPSPENPPKVVDSGVRHELSHPNCTPKAGEQTERLVATLFYRSTAPRVSNAIPSPKKAATPQGSRSPSLRAAAAESDIPPTMAPSSSLDSYPLEPPAAEPEPLDHLYGSYVTPMCITSFLHLMTTFPLPKGSTDLTSAHRCLKLDASPEQHPVVVELTLSPAPAKDYLSLADLRKHELIYRFEREWNVDVALRADTLWRRYPRLVVFDMDSTLITQEVIDLLAATIKDPPDLAARVADITHRAMLGELEFDSAFRERVKLLAGLPETIFEDLRPVLEVTNGVRPLLRALKRLGVKTAVLSGGFLPLTSWLAGELGIDYAHANEVVIDEASGRLTGEVKGRIVGKERKRELLIEIAEKEGIALEQVVAVGDGANDLLMMDAAGLGVAWNAKPRVQMEASARINGDSLLDLLYLFGFTDEEVRQLSA

SEQ ID NO: 3546 - DNA, 1308 bp, Myceliophthora thermophilia
atgaccacccgttatcgcgttgaatatgctctcaaaactcaccgccgtgatcaattcatagaatggatcaagggcctgctggcagtgccattcgtgctgtattcgcagcctcacggagccatcgaccggcagggcacggtaaacctatctcagacacgcgaggaagcacatcggagatacagcgaaattctgcgcgatgtcgagggcatgatcgacgaccacattgcccaccagaacgaccccgagaatccattcccgtcgaaactcaagctcctggtccccagcatcgggcccttcttcactcgactacccctagaggccgccttcaaatatcaggacagcaagcgttacatctcctcccgccgcttcgtctccccctccttcaatgacgtccgcctcatcctcaactcggcccaaatgatggccgtgacaacatacggcaccctccagctagccaccttcgatggtgacgtgaccctctacgaagacgggcaaagcctcgaaccaaccagccccatcgtcccgcggctgatcgacctcctccgcaaaaacgtaaagattggcatcgtcaccgcggcaggctacacaaccgccgacaaatactacgcccgcctgcacggactcctcgacgcgctggccagcacgaccgagctaaacccctcccaaaagcaatccctcatcgtcatgggcggagaagcgaactacctcttcgagttctcgccttcgtccccgcacctcttggcccccgtcccgcgcgagaagtggctgaccccggaaatggccgcctgggatgaccgcgacatcgcccaagtgctcgacgtcgccgaggcggccctgcgcgactgcgtccggaccctcaacctgccggccgtgctgatgcgcaaggaccgcgccgtcggcatcgtcccgaacccgcccgagacgcgcatcccgcgcgagtcgctcgaggagacggtcctggtggtgcagaagacgctggagctcagcgcggcagggcgggcccgccgcgtgcccttctgcgccttcaacggcgggcgcgacgtctttgtcgatatcggcgacaagagctggggcgtgacggtgtgccagcgctggttcggatcttcgtccgagccgagcagaggccaaggcgaaggcggcgcaatcaaggggcagaacacgctgcacgtaggcgaccagttcctgagcgcaggggcgaatgatttccgggcgaggagcgtcggcacgacggcgtggatcgcgagcccggcagagacggtcgacctgctcgacgagttggccgagttgatggagaagagggcgtcttag

SEQ ID NO: 3547 - protein, 435 aa, Myceliophthora thermophilia
MTTRYRVEYALKTHRRDQFIEWIKGLLAVPFVLYSQPHGAIDRQGTVNLSQTREEAHRRYSEILRDVEGMIDDHIAHQNDPENPFPSKLKLLVPSIGPFFTRLPLEAAFKYQDSKRYISSRRFVSPSFNDVRLILNSAQMMAVTTYGTLQLATFDGDVTLYEDGQSLEPTSPIVPRLIDLLRKNVKIGIVTAAGYTTADKYYARLHGLLDALASTTELNPSQKQSLIVMGGEANYLFEFSPSSPHLLAPVPREKWLTPEMAAWDDRDIAQVLDVAEAALRDCVRTLNLPAVLMRKDRAVGIVPNPPETRIPRESLEETVLVVQKTLELSAAGRARRVPFCAFNGGRDVFVDIGDKSWGVTVCQRWFGSSSEPSRGQGEGGAIKGQNTLHVGDQFLSAGANDFRARSVGTTAWIASPAETVDLLDELAELMEKRAS

SEQ ID NO: 3548 - DNA, 711 bp, Myceliophthora thermophilia
atgataccgcgacagccatatgcaccgacaccgcacagctatgtccccaattccacgctgtcggccaccataaacctcgacgaggaggtcaagctcgccgagacacgcgccgaacgcgatcttcaagactccttggccgagatcttcagcatcatcgtcacgatcgacgagctcgaaaaggccttcctcaaagatgccatccccgaggccgaatacaccgagatctgcgagcgggcgctgaagcagtacaagtcgctgctcgccgacgagacggtcgcaaaggcattcgtgggcctggaggagttcaaggccgagtgggatctcgaagtgccccgtgcgacagagcggatacgggtaggcatgccctcgacggcggtaacggccatctcgggcgccgcccctgcgccggccgcggggggcaacaccagcggcgccctgatcctggaggcgacccaggacttcatcacgttcctcgatgcgctccggctgggcttgctggcgaaggaccagctccacccgctcctgacggacgtgatccagtcggtcaacaaagtgacggaccgggactttgacagcaggggcaagattgtgcagtggctcatcacgctgaaccagatgaaggcgaccgaggagttgagcgaggagcaagcgcgggagttggagctagatatcaactcggcgtatcaagggttcaagagtatcctctcatga

SEQ ID NO: 3549 - protein, 236 aa, Myceliophthora thermophilia
MIPRQPYAPTPHSYVPNSTLSATINLDEEVKLAETRAERDLQDSLAEIFSIIVTIDELEKAFLKDAIPEAEYTEICERALKQYKSLLADETVAKAFVGLEEFKAEWDLEVPRATERIRVGMPSTAVTAISGAAPAPAAGGNTSGALILEATQDFITFLDALRLGLLAKDQLHPLLTDVIQSVNKVTDRDFDSRGKIVQWLITLNQMKATEELSEEQARELELDINSAYQGFKSILS

SEQ ID NO: 3550 - DNA, 1689 bp, Myceliophthora thermophilia
atggcgccggacctcaactccctcccggcctcgcctgcccagggcaaggccgttaacctcacacgcagcgggctcaacagcggccctgccccgggcgagaagctgcccaacattctctacatcatggccgaccagctcgcggcgccgctcctcaagatgtacaacccggactcgcagatcctgacgccgaacctggacgcgctggcggccaggtcggtgcagttcgactcggcctactgcccgtcgccgctgtgcgcaccctcgcgcatgagcatgatcacgggccagctgccgatgaagattggcgcctacgacaacgcgtcgtccatctcgagcgacatccccacctacgcgcactacctgcgcctcaagggctaccacaccgtcctggccggcaagatgcactttgtcggcgaccagctgcacggctacgagacccgcctgaccagcgacatctacccgggcgactacggctgggccgtcaactgggacgagcccgacacccggctcgagtggtaccacaacgccagctccattctgcaggccggcgtctgcgtccgcagtaaccagctggactacgacgaggaggtcatgtatcggtccacccagttcttgtatgatcacgtccgcgaggggcccggggcccggccattctgccttacggtctcgttgacgcacccccacgacccgtacaccatcgagcaaaagtactgggacctctacgagggcgtcgacattgagctgcccaaggtcaagatccccaaggaagagcaggatccgcacagcaagcgcctgctcaaggtgtgcgacctctgggacaacgagttcaccgacgagcagatcaagcgggcgaggcgggcctactatggcgccgtcagctacgtcgacgactgcgtcggcaagctgctggacgtgctcaagaagtgcaggctggacaagaacaccatcgtcatcttcagcggcgaccacggcgacatgctcggcgaacgcgggctctggtacaagatgagctacttcgagtcctcggtccgcgtgcccctgctcatctcgcaccccacccaattcacgccgcaccgtgtcaaggccaacgtgtcgaccctcgacatcctgcccaccatgtgcgacctggtcggcaccaagccggcctccttcctgcccctcgacggcgtctccctgctgccgcacctgcagggcgtccccggcgggcacgacgaggtgtttgccgagtacacgggcgagggcacggtgcgcccgctcatgatgatccggcgcggccgctggaagtacatcacctgccccgccgacggctcgcagctgtacgacctcgaggccgacccgctcgagctcgtcgacctggtcaagagcggcgccgcctcctccgacgaaaagatccgccgcgtctttgaggattttgaggccgaggcgcacgccaagtgggactttgacgagatcacgcgccgcgtcctcgagtcgcagcgcaagaggcggctggtgtggtccgcgctgatccggggcaagtttaccagctgggattacaatccgatcgacgacggccgggagaagtacatccgctcgcatatcccgttggatgatttggagcgtagggcgcgcttcccggctgtggacgcatttggaaacgagacgagctccgccgtcgttgcgcaccaagccggctcgcacggggagtga

SEQ ID NO: 3551 - protein, 562 aa, Myceliophthora thermophilia
MAPDLNSLPASPAQGKAVNLTRSGLNSGPAPGEKLPNILYIMADQLAAPLLKMYNPDSQILTPNLDALAARSVQFDSAYCPSPLCAPSRMSMITGQLPMKIGAYDNASSISSDIPTYAHYLRLKGYHTVLAGKMHFVGDQLHGYETRLTSDIYPGDYGWAVNWDEPDTRLEWYHNASSILQAGVCVRSNQLDYDEEVMYRSTQFLYDHVREGPGARPFCLTVSLTHPHDPYTIEQKYWDLYEGVDIELPKVKIPKEEQDPHSKRLLKVCDLWDNEFTDEQIKRARRAYYGAVSYVDDCVGKLLDVLKKCRLDKNTIVIFSGDHGDMLGERGLWYKMSYFESSVRVPLLISHPTQFTPHRVKANVSTLDILPTMCDLVGTKPASFLPLDGVSLLPHLQGVPGGHDEVFAEYTGEGTVRPLMMIRRGRWKYITCPADGSQLYDLEADPLELVDLVKSGAASSDEKIRRVFEDFEAEAHAKWDFDEITRRVLESQRKRRLVWSALIRGKFTSWDYNPIDDGREKYIRSHIPLDDLERRARFPAVDAFGNETSSAVVAHQAGSHGE

SEQ ID NO: 3552 - DNA, 3480 bp, Myceliophthora thermophilia
atgtcgctcgcggcgccaccggcgcacatggcgaccacgacactcaagattgaggggatgacttgcggcgcatgtacctcggccgttgaagcaggcttcaaaggtgtcgatggtgtcggcagcgtttcggtcagcctggtgatggagcgcgcggtggtcatgcacgatccccagcggatatccgccgacaggatacgagagatcatagaggaccgcggattcgatgccgaagtcttgtcgacagacctgccctcgccagttaccccgcgcgcctcgttcggcggccaccccagcgacagcggcccggctacgatggttacgacggtgggaatcaagggtatgacctgcggcgcgtgcacgtcggcggtcgagggcggattcaaggacgttgcgggcgtcaaacatttcagcatatcgttgctcgcggaacgggctgtgatcgaacacgatccctcgctcttgactggcgaggctatccgtgagatcatcgaggaccgggggttcgatgccgaggtcctcgaaagcaacgaaaagggtccagaggcgaaggcgggttccgaaggtgcaaagacgactccgtcaacagccaccacgactgttgcgattgaaggaatgacttgtggtgcgtgcacctcggccgtagaggaagggttcaggaatgtcgacggactcgtgcgtttcaacatcagcctgctcgcggagagggctgtcatcacccacgacccaaccaggctgccgtcagacaagatcgtcgagatcatcgaggaccggggtttcgatgccaagattctctcgactattttcgattcgctggatcacggaagcggcgcatcgaccgcgcagttcagaatctacgggaccctggacgcggccgcggcgaaatccctcgaggagaagttgagcgcactccccggcatcaaaagcgcgaggcttgcgctgagtacctcccgcctgaccgtgacccacctacccaacgtcacggggctacgggctattgtcgagaccgtcgagagcgccggttacaacgccctggtcgcagacaatgacgacaacagcgcccagatcgagtctctggccaagacccgcgaaatcaacgagtggaggcgggcattccagatctcggcctcgttcgccgtcccggtcttcctcatcagcatggtgttccccatgtgcatcccggctctggattttggttccatcagactcattccggggctgtacctcggcgatgtcatatgcatggcactcacgatccctgtccagtttggtatcgggaagcgcttctacgtctccgcttggaagtctctcaagcatggctctccaacgatggatgtattggttgtgctgggcacctcgtgcgccttcttcttcagcgtcatggccatgatcgtttccatcctgtttccgccccatacgaggcccagcaccattttcgacaccagcaccatgctcatcagtttcatcaccctgggacgcttcctggagaaccgcgccaagggtcagacctccaaggcgctctcgcgactgatgtccctggccccgtcgatggctactatctatgttgaccctatcgccgccgaaaaggctgccgaagggtggactagtgatcccaacggggaggatccgaagcagccgctcgatggtggcgcggccgaggagaaagtgatccccacagagctcctccaggtgggagacattgtcattctccggccaggagacaagatcccggcggacggcgttctggtgcgtggagagacttacgtggatgagagcatggtcaccggcgaggcgatgccggttcagaagacaaaaggaagcttcctgatcggcggcaccgtcaacggtcacggaagggtcgactttcgtgtcacccgagccggccgcgacacgcagctcagccagatcgtcaagcttgtgcaggacgcgcagaccagccgcgctcctatccagcgcctggctgacgtgcttgctgggtatttcgtcccgacgatcctattcctcggcctcatgacgttcctcgtctggatggtcctgagccatgtgttgccgaacccgcccaagatcttcctggaagacgcgagcggtggcaagatcatggtttgcgtgaagctctgcatctcggtcatcgtctttgcgtgcccgtgcgctctcggtctcgccacgcccaccgccgtcatggtgggcaccggagtgggcgcagagaacggtatcctcgtcaagggcggcgccgccttggagacgacgaccaaaatcacccaggtcgtccttgacaagacgggaactctgacgtacggcaagatgaccgtggccaaggccgacatcgcccctccttggagcgacaccgactggcggaagcggctgtggtggacgatcgtcgggctagccgagatgggcagtgagcacccgatcggcaaagcggttctgggcgccgccagggcggagctcggcctcggtccggacggtacgatcgagggcagcgtcggcgacttcgcggcggcggttggtaagggcatcaccgcgtatgtcgaaccggcgaccgcggccgaccggacgcgctacaaggtcctgatcggcaacgccctcttcctccggcaaaacgacgttgatgtcccccgcaccgcgatcgaagcctcggaacaaaccagcgagtctcgctctgcgaagcccaacaacacgggcacaaccaacatcttcatcgccatccagggcgcctacgccggccatctctgcctctccgacaccatcaaggacggcgcggccgccgccatcgcggtgctgcaccgcatgggcgtgcgcaccgccatggtcacgggcgaccagcgcggcacggcgctggccgtcgcctcggccgtcggcatccacgccgacgacgtctacgcgggcgtgtcgccggaccagaagcaggccatcatccggcagctgcaggaggcgggctcggtggtggccatggtgggcgacggcatcaacgactcgcccgcgctggcgacggccgacgtgggcatcgccatgagctccggcaccgacgtggccatggaggccgccgacgtggtgctgatgaagcccaacgacctgatggacatacccgcggcgctcagcctggcccgcaccatcttccgccgcatcaagctgaacctgctgtgggcgtgcctgtacaacgtggtcggcctgccgttcgccatgggcgtcttcctgcccttcggcctccacatgcaccccatgatggcgggcgcggccatggcggccagcagcgtcagcgtggtgaccagcagcctgtttctgaagctgtggaagcggccccggtggatggacgagatggaggccgagatgagggacgggggtgtcgtccacccgaggcggaagcgatggtgggcggtgctgggcggggcccgcgagctggtcggtggactgtttggggagaggagggagaaggccgagggctatgtcccacttgcgacgctcgatcgcgagtcgccggtgtga

SEQ ID NO: 3553 - protein, 1159 aa, Myceliophthora thermophilia
MSLAAPPAHMATTTLKIEGMTCGACTSAVEAGFKGVDGVGSVSVSLVMERAVVMHDPQRISADRIREIIEDRGFDAEVLSTDLPSPVTPRASFGGHPSDSGPATMVTTVGIKGMTCGACTSAVEGGFKDVAGVKHFSISLLAERAVIEHDPSLLTGEAIREIIEDRGFDAEVLESNEKGPEAKAGSEGAKTTPSTATTTVAIEGMTCGACTSAVEEGFRNVDGLVRFNISLLAERAVITHDPTRLPSDKIVEIIEDRGFDAKILSTIFDSLDHGSGASTAQFRIYGTLDAAAAKSLEEKLSALPGIKSARLALSTSRLTVTHLPNVTGLRAIVETVESAGYNALVADNDDNSAQIESLAKTREINEWRRAFQISASFAVPVFLISMVFPMCIPALDFGSIRLIPGLYLGDVICMALTIPVQFGIGKRFYVSAWKSLKHGSPTMDVLVVLGTSCAFFFSVMAMIVSILFPPHTRPSTIFDTSTMLISFITLGRFLENRAKGQTSKALSRLMSLAPSMATIYVDPIAAEKAAEGWTSDPNGEDPKQPLDGGAAEEKVIPTELLQVGDIVILRPGDKIPADGVLVRGETYVDESMVTGEAMPVQKTKGSFLIGGTVNGHGRVDFRVTRAGRDTQLSQIVKLVQDAQTSRAPIQRLADVLAGYFVPTILFLGLMTFLVWMVLSHVLPNPPKIFLEDASGGKIMVCVKLCISVIVFACPCALGLATPTAVMVGTGVGAENGILVKGGAALETTTKITQVVLDKTGTLTYGKMTVAKADIAPPWSDTDWRKRLWWTIVGLAEMGSEHPIGKAVLGAARAELGLGPDGTIEGSVGDFAAAVGKGITAYVEPATAADRTRYKVLIGNALFLRQNDVDVPRTAIEASEQTSESRSAKPNNTGTTNIFIAIQGAYAGHLCLSDTIKDGAAAAIAVLHRMGVRTAMVTGDQRGTALAVASAVGIHADDVYAGVSPDQKQAIIRQLQEAGSVVAMVGDGINDSPALATADVGIAMSSGTDVAMEAADVVLMKPNDLMDIPAALSLARTIFRRIKLNLLWACLYNVVGLPFAMGVFLPFGLHMHPMMAGAAMAASSVSVVTSSLFLKLWKRPRWMDEMEAEMRDGGVVHPRRKRWWAVLGGARELVGGLFGERREKAEGYVPLATLDRESPV

SEQ ID NO: 3554 - DNA, 543 bp, Myceliophthora thermophilia
atgtcctttgcagaagacggccacaacgccgtccctggcagcgtccaagccaacaagcttggcggcgcaaggaaaggtgccgaaccgggtcagaatgccgcgaagaggttacaaacagagcttatgcagctcatgacatcgcccgcgccaggggtgtcggcctttccttctgccgacggcaatctgctctcctggagggctactattgagggtcccgacgacacgccctactccgggctcacgttcaagctcagctttgagtttccgtccaactacccgtatgcaccgcccactgtgctcttccggacgcccatctaccaccccaatgtcgacttctcgggacgcatctgcctcgacattttgaaggacaagtggaccgccgcatacaacatccagaccgtgttgctgagtctgcagtctctgctgggagagccaaacaatgcttctccgctgaacggcgaggctgctgagctgtgggacaaggacccagccctgttcaagaccaaggttatggaccgccacaaggatgtcgaggacgattga

SEQ ID NO: 3555 - protein, 180 aa, Myceliophthora thermophilia
MSFAEDGHNAVPGSVQANKLGGARKGAEPGQNAAKRLQTELMQLMTSPAPGVSAFPSADGNLLSWRATIEGPDDTPYSGLTFKLSFEFPSNYPYAPPTVLFRTPIYHPNVDFSGRICLDILKDKWTAAYNIQTVLLSLQSLLGEPNNASPLNGEAAELWDKDPALFKTKVMDRHKDVEDD

SEQ ID NO: 3556 - DNA, 1830 bp, Myceliophthora thermophilia
atggcgacaacgatgcaacatttgcaactagaccctctcccacgcgacctccccttcagaattatctccaagacgattgggaggggcgcatatgcatccatcaagaaagcgataccccttgatgcgccgtcgccggtctttgccgtcaagctaatccacaagggctatgcgatcaggcagggccgcatctctgcgaagcagattgcgatggaggtgtcgctgcactcacacatcggccagcacccaaacatcattgagtggttcgccacgggcgaggatgcggtatggagatggatcgccatggagtttgccgagggcggcgacttgtttgacaagatcgaagcagacgtcggagtacaggaggatattgcgcacctctacttcctgcagctgatcagcggtgtcagcttcatgcactccaagggcgtcgcccatcgcgacctcaagcccgagaacatcctcctgtcggagagcggtaatctcaagatcgcggactttggcatggcaaccatgttcgagtacaaaggggccaggaagcagagcagcaccatgtgcggaagtccgccttacgttgcccccgaggtgttgcagtgcgcgaggcaggacaggaagtcgggagacgggcccaagtactcggccgacctggtggatatctggtcctgcggcgtcatcctgtttgtcctcctcgtcggcaacacgccgtgggacgagccgacgtcgggaagctgggagttccaggagtacgtgcgaactaacggccgcagcaccgacgcgctctgggggagggtgcctgccgacgccctgtccctgctccggggcatgatgaacgtcgaggcgagcaagcgattctcgtttgcccagatccgccagcacccgtggtacacacggcgcaaccccctcctgacatcggacggcaagatctcggacccggttgcgctcgccacgcggatgctcgccggcctgcgcgtcgatctcaatgccgagccaaccccatcccagcgccaatcccagccagaggcaatggatatcgacgcccaccccgcccacgactggtcatcctccaagctcccggccacccagccagaaacgccgatcaacgacgtgctcttcgactgggagcggcccgcgccccgcactctcctaggcggcacctacgccatctcctccacccagcctctcgccacgggctcctcctcctcctccctcaggacagcactagcaggcaacaataacaacaaccccccaagctccgccgccgccgccgccgccgccgccctcgaggcgctggcggacgagccaacaatgagccagttctcgcagacgcccggcgtgcccctgtccctgacgcagcacgcccgccagttccgcgacatcgtcccgtcgtactcgctcacccgcttcttctcggccgtgcccccctcgctgctggtccagatgctgcacgacgcgctgcaccagctcaacgtgcccctgccgccgccgtcccgctcggccgcgccgacggacccgcaccaccaccagcacggcgagcacgtcgcgaccttcaaggtgcgcaccctggacggcaggcggcaggggctgcacggcgacgtcctcgtcgatcggttccggctggtctcgtcgtcggcgggccaccacggggggaaggaagaagaagaagaagaagggggggagctggagctgctggaggtgaggttcgtcaaggtcaagggcgatccgctcgagtggaggcgcttcttcaagaaggttgccctgctctgccgggatgccgtgtatagcggcgacgggggcaacgcgggggggacgggagttgggctggaacgagcgtag

SEQ ID NO: 3557 - protein, 609 aa, Myceliophthora thermophilia
MATTMQHLQLDPLPRDLPFRIISKTIGRGAYASIKKAIPLDAPSPVFAVKLIHKGYAIRQGRISAKQIAMEVSLHSHIGQHPNIIEWFATGEDAVWRWIAMEFAEGGDLFDKIEADVGVQEDIAHLYFLQLISGVSFMHSKGVAHRDLKPENILLSESGNLKIADFGMATMFEYKGARKQSSTMCGSPPYVAPEVLQCARQDRKSGDGPKYSADLVDIWSCGVILFVLLVGNTPWDEPTSGSWEFQEYVRTNGRSTDALWGRVPADALSLLRGMMNVEASKRFSFAQIRQHPWYTRRNPLLTSDGKISDPVALATRMLAGLRVDLNAEPTPSQRQSQPEAMDIDAHPAHDWSSSKLPATQPETPINDVLFDWERPAPRTLLGGTYAISSTQPLATGSSSSSLRTALAGNNNNNPPSSAAAAAAAALEALADEPTMSQFSQTPGVPLSLTQHARQFRDIVPSYSLTRFFSAVPPSLLVQMLHDALHQLNVPLPPPSRSAAPTDPHHHQHGEHVATFKVRTLDGRRQGLHGDVLVDRFRLVSSSAGHHGGKEEEEEEGGELELLEVRFVKVKGDPLEWRRFFKKVALLCRDAVYSGDGGNAGGTGVGLERA

SEQ ID NO: 3558 - DNA, 204 bp, Myceliophthora thermophilia
atgttacctactataactacagaaagaaagggcactataactatcgacgaaactaccaaggacgtcatcgaagtagcggctacaagctacaaagacaagggcaataacgcggacagtctcggacacgatggcaatggtaaagacgaacaagcactatactccgaactagttactatagatctagagacaggtcttgtcgaatag

SEQ ID NO: 3559 - protein, 67 aa, Myceliophthora thermophilia
MLPTITTERKGTITIDETTKDVIEVAATSYKDKGNNADSLGHDGNGKDEQALYSELVTIDLETGLVE

SEQ ID NO: 3560 - DNA, 1464 bp, Myceliophthora thermophilia
atggccattggatccatgcccgcaacggcggattcgtggggttgctggccccaaccacaacccggcggcgccgactttggcatgatgcaggccggcttggttccgtacgactgccgggcaacaaccgcggctcacatcccccgtgccgaattatctcaacactacctgccgaccacctttagctcggcggccccagtacatccgcctgcctctcctcagtaccatgcgcccgtgtcatacggcgggtacaacccctacggtgcgccagccatgctggacgcaccattcaagcctcgagaatccctcgagcgcatccagccccggggcttggtgtccgaacctgccgagtacggaggtgcccgtgagcgcgcggatgaggtgccgtgcgtcaagcgaagctgcagcccgtcggtcaagaccgagaccaatctggacccaagctcgccagcctccgaggctgcccctcccgccactccggcgcaagcagctccggtacaccagttcaacacggccatcgacaacgtcatgcgcgtgatcgaggccaagcgtgagattctcgaaccaacgagcgaggccgaatccgcgcaaaagcaggagaaggatgagactggggaggacacccaggtatgcccgtactgccagcgccgctttacacagagcgtcaacctcaagacgcacatcaatcgtcacacgggagagagaccctacgagtgccccgaatgtgacaagtgcttccctcaactctcgaatgtcaaagcgcacatgaagacacacattaggagggagttaagggccgtctgggcccatcagaacacctaccatgtcgaggagattgaagcattcaatgccaagctggccgccgtcaaggacaagagtatgatatccgaagaagataaagaaatggccaggtatctcgtcgatgtgcacaatctagccaacaagggcatcaagggccgcggaaaaggtcgcaaggtcaagcgtgtcctcatgctgcacccaccgcagcaccaggcatctccctccacaagcccggtcagtgctaccggccacacaggaccctaccaaatgtccctccaacctcatgcgtttccacagcagcagcagcagcagcagcaacaacaacatcatcaacatcaccatcatcaacaacaacaacaacatcatcatcatcaacaacaacaacatcatcaccagcagcaccagcagcaccagcagcaacccgcaccccacgggcttccctactatggcctgagcaacccagccgcttacagtatgagccggcatccctccatgctctttggacccctcagcatcaacacgcgggaaccgtacggccatggggtctacggcatggactcggaccaactcagcgatgccagcagtgcccacagctcgccggccgtcatgcaccccttcgaggacgagcacggccgggagttggcttttggcgagaggctctactga

SEQ ID NO: 3561 - protein, 487 aa, Myceliophthora thermophilia
MAIGSMPATADSWGCWPQPQPGGADFGMMQAGLVPYDCRATTAAHIPRAELSQHYLPTTFSSAAPVHPPASPQYHAPVSYGGYNPYGAPAMLDAPFKPRESLERIQPRGLVSEPAEYGGARERADEVPCVKRSCSPSVKTETNLDPSSPASEAAPPATPAQAAPVHQFNTAIDNVMRVIEAKREILEPTSEAESAQKQEKDETGEDTQVCPYCQRRFTQSVNLKTHINRHTGERPYECPECDKCFPQLSNVKAHMKTHIRRELRAVWAHQNTYHVEEIEAFNAKLAAVKDKSMISEEDKEMARYLVDVHNLANKGIKGRGKGRKVKRVLMLHPPQHQASPSTSPVSATGHTGPYQMSLQPHAFPQQQQQQQQQQHHQHHHHQQQQQHHHHQQQQHHHQQHQQHQQQPAPHGLPYYGLSNPAAYSMSRHPSMLFGPLSINTREPYGHGVYGMDSDQLSDASSAHSSPAVMHPFEDEHGRELAFGERLY

SEQ ID NO: 3562 - DNA, 243 bp, Myceliophthora thermophilia
atggcagagaacaccgagcaaaaccacaaccaatggaccaactgggcaagacacacgggacacggcccgggacaggggccgactatcacgacctccacatcgttcgagctagaccatggaatcacagacctgatcatccgagccatcgatcaaccccaagatcatcgcctattccagcgtctaacgttagaaaacctcgccccgccaatagttctctggtacacatggtggccagagagataa

SEQ ID NO: 3563 - protein, 80 aa, Myceliophthora thermophilia
MAENTEQNHNQWTNWARHTGHGPGQGPTITTSTSFELDHGITDLIIRAIDQPQDHRLFQRLTLENLAPPIVLWYTWWPER

SEQ ID NO: 3564 - DNA, 2514 bp, Myceliophthora thermophilia
atggcggactacgaccgcaggggcggcggcagcagctacaatcccaagaagcgccgctaccgagacgatgacgactacgaccggcgcgggccccggcgccgctacgacgccccgcctcacgttcgcgtgcgcaagcagctcatagccatcgccgagaatccgatgcggccgtggcacgaagaggtggcgtcgatcgcgaccctcttcaccgacaactgggatgacgagctgctgcgcaccaactttgtcgacctggtcctccagctggccgtcgagcagccgctcaagacccccttcgtcgccgccgtcgtcctgctcgccaacgccacccgccccgaggtcgtcgacatgctgctggccaagctggcccgtctcgtcgaggagaagatcggcctgggcgagtggagggaggtgaagctgtacctgaagctgctggcctgtctgcaggggtgcctcgaaggcgagggcgtgttccccctgctggaggagctattcgcgagggcggtggacctgcagacggcgagctcggaggatacaatcggtaccgagatcgtcaagatcatcctcctgacgttgccgtacgtcatggtcgccgcgcccggccagtgggcgcaaaaggcggcggacctgatggagaagacggagatcatcgcctccgagccacacaccttgcaggcgctcatcgagccgtatcatccggaagctggcgacgagaacccgccccagtcgcagagcctgatcgtgctgctgcagacccagctgcagaacgaggccaacaacggatggaccttgtcctgcttgccgaggccgtgggagttcccggtgggagaggttgagcagcggtcgaagctcgaagatgccgccaagcatgcgctcccccccattgccattcccaagacggtcgttgccgggccacggccgctgttccccgagatatacttttcggtctacgcaaatcaggaagtcgaatcggtgccgcctctgaacaacgtcgctgcgtccctgatccgggatgccctcctggacaccatcaacgtcctcgacttcaaccgcaacgtcaccgcgcggcacctgatcgacctggactgctacttcgccccccggacgtttgccgctagggctacgcccttcgataagctccgcgatatcgagccgcccaagtcgacatggaagccggaagacgtcgcggtcgatgccgtcttctcccagctgtttcagctgccgaacccggagcagaagctggtttactaccactccgtcctcaccgaggcatgcaagctcgccccggcagcgatagccccgagtttagggcgcgccatccgctatctctaccggaactcgcctcgcctcgacctggagctcgcgacccgcttcctagactggttctcccaccatcttagcaacttcggcttcacttggaagtggaccgagtgggtggatgatgtgtatctgccagacgtgcaccctcgcaaggctttcatcctaggggccatcgacaaggagatcaggctcagcttcgcgcagcgcatcaagaataccctgccggatccgtacaaggagctgatcggcccagaaaaggagaaggatacgccggatttcaagttcgccagcgacgacactcccttcgcagccgagggtcgcgaaatcgccggtctcctcaagcgcaaagccgacgacgaggagatcgaggccgtgatccagcgcatccagtcgcaggccatcgaccgcgagatcgacgccctcgtagcgagcaccgacgtcttcgtgacgtgcgtcctgcacgtcggcagcaagtcactctcccacgtcctcgcagccatcgagcgcaccaaggaccggcttgccgacgcgggcgccgcctcggacgccgcgcgctcccagatcatcacggccaccatggcctactggtccgcccacccgggcgtcgccctccgcatcatcgagaagctgctcaactacagcatcctgaccccggagacggtcatcaactgggccctggtcggccgcgcgggcagtacccgcggcgaggcgctctcggtcgcctacatgtacgagatggtcttcaacaccgtcgtcaaggtcacgggccgcgtgcgccagctcgtcaccaagccttcctcgcccgcctcggcagaagacgccgaggaggaggcggccacgcgcgatcgcgagatcaaggcgatgcgggcgttgtttgccaccatcgaggacgccctctcgtcgtgggcgacgggcagcaaggacgagatgatggaggcgagcgagggcgaggggaacggcgagggcgagcggctggtgcggaggtgggctgagcgctggctgcgcgtctttcggcggcgggcggcaatcgaggaggcgttcctcgccgaggcggagaaggagcggacgagaaaggcgcagcaggaggaggcgtcgggcgggccgcaagggccgggggaggcacaggggcaggaggggccagacgggaaagaagggtcgatgcaggtggacactgaagggccggtcgttgcttaa

SEQ ID NO: 3565 - protein, 837 aa, Myceliophthora thermophilia
MADYDRRGGGSSYNPKKRRYRDDDDYDRRGPRRRYDAPPHVRVRKQLIAIAENPMRPWHEEVASIATLFTDNWDDELLRTNFVDLVLQLAVEQPLKTPFVAAVVLLANATRPEVVDMLLAKLARLVEEKIGLGEWREVKLYLKLLACLQGCLEGEGVFPLLEELFARAVDLQTASSEDTIGTEIVKIILLTLPYVMVAAPGQWAQKAADLMEKTEIIASEPHTLQALIEPYHPEAGDENPPQSQSLIVLLQTQLQNEANNGWTLSCLPRPWEFPVGEVEQRSKLEDAAKHALPPIAIPKTVVAGPRPLFPEIYFSVYANQEVESVPPLNNVAASLIRDALLDTINVLDFNRNVTARHLIDLDCYFAPRTFAARATPFDKLRDIEPPKSTWKPEDVAVDAVFSQLFQLPNPEQKLVYYHSVLTEACKLAPAAIAPSLGRAIRYLYRNSPRLDLELATRFLDWFSHHLSNFGFTWKWTEWVDDVYLPDVHPRKAFILGAIDKEIRLSFAQRIKNTLPDPYKELIGPEKEKDTPDFKFASDDTPFAAEGREIAGLLKRKADDEEIEAVIQRIQSQAIDREIDALVASTDVFVTCVLHVGSKSLSHVLAAIERTKDRLADAGAASDAARSQIITATMAYWSAHPGVALRIIEKLLNYSILTPETVINWALVGRAGSTRGEALSVAYMYEMVFNTVVKVTGRVRQLVTKPSSPASAEDAEEEAATRDREIKAMRALFATIEDALSSWATGSKDEMMEASEGEGNGEGERLVRRWAERWLRVFRRRAAIEEAFLAEAEKERTRKAQQEEASGGPQGPGEAQGQEGPDGKEGSMQVDTEGPVVA

SEQ ID NO: 3566 - DNA, 1185 bp, Myceliophthora thermophilia
atggcgtccaataggccagcagcattcaacaccctgcggatgggagaggtgatccgcgaaaaggtacaagatggcatcaccggcgagacccgcgacctacagtatacccagtgtaagattgtcggtaacggatcgtttggcgttgttttccacaccaagcttgcgcctagcaatgaggacgcggcaatcaagcgcgtgttgcaggacaagaggttcaagaaccgcgagctgcagatcatgaggatcgtgcggcaccccaacatcgtgcagttgaaagccttctactactcgaacggcgagcgcaaggacgaggtctatttgaacctggttcaggagttcgtgccggagaccgtatatagggcgtcgcggttcttcaacaagatgaagacgaccatgccgaccctggaggtcaagctgtacatctaccagctcttccgagctctcgcgtacatccactcgcagggcatctgccaccgcgacatcaagccgcagaacctcctcttggaccccgcgaccggggtgctgaagctctgcgacttcggcagtgcgaagattctggtggagaacgaacccaacgtgtcgtacatttgctcccggtactacagagcaccggagctgatctttggcgcgacaaactacacaaccaagattgatgtgtggtctaccgggtgcgtcatggccgagctgatgttggggcaaccactcttccccggagaatccggcatcgaccagcttgtggaaatcatcaaggtcctgggtacgccgacccgcgagcagatccggaccatgaacccgaactacatggagcataagttccctcagatcaagccccatccattcaataaagtgttccggaaggcggacgcgaatgctatcgacctgatcgcccggctactcgagtacaccccgacagagcgtctggcggccattgatgccatggtgcatccgttcttcgacgaacttcgggaccccaacaccaagcttccggattcgagacacgggacgggccagctccgcgaccttcccgctttgttcgatttctcgcgccatgagctgtcgatcgcccctcaccttaaccaccagcttgtgccccctcacatggttccagagctcgcgaagcgcggtctcgacattgacaacttcacgcccatgacgaagcaggagatgatggctaagctagactga

SEQ ID NO: 3567 - protein, 394 aa, Myceliophthora thermophilia
MASNRPAAFNTLRMGEVIREKVQDGITGETRDLQYTQCKIVGNGSFGVVFHTKLAPSNEDAAIKRVLQDKRFKNRELQIMRIVRHPNIVQLKAFYYSNGERKDEVYLNLVQEFVPETVYRASRFFNKMKTTMPTLEVKLYIYQLFRALAYIHSQGICHRDIKPQNLLLDPATGVLKLCDFGSAKILVENEPNVSYICSRYYRAPELIFGATNYTTKIDVWSTGCVMAELMLGQPLFPGESGIDQLVEIIKVLGTPTREQIRTMNPNYMEHKFPQIKPHPFNKVFRKADANAIDLIARLLEYTPTERLAAIDAMVHPFFDELRDPNTKLPDSRHGTGQLRDLPALFDFSRHELSIAPHLNHQLVPPHMVPELAKRGLDIDNFTPMTKQEMMAKLD

SEQ ID NO: 3568 - DNA, 2874 bp, Myceliophthora thermophilia
atggcctcaacattggatcacctcgcccagttgctgaatgcaactttggatgcgcagagccatcctgagaatgccctcaaagaggaatcgaagaagccgaaatattccttgtcgctccttagcatcgtgaacgccgatgctcaacccctcaagatccgcctcgccgccgctctcgctttcaagaacttcattcgccataactatgtggacgaagagggcaactacaagctccctctggatgaggtgcagaccatcaaatcagagctcgttgggttgatgatttcatctccccccacaatacagacccagcttggcgaagccatcagcatcattgctgattcggacttttgggagcgctgggacactcttacccaggacctcgtcagccgtctgtccaataccgactataaggtcacaaacggcgttctggaagttgcccactcgattttcgtgcggtggcgccctctattccagtccaacgaactaaacagggagattctacatgttgtcggggttttcggagagccgttcgtccagatgctcagcatcgcagacgggcaaatcgaggcaaacaaagacaatgccagcgcactcaaaggctggctcgaaactatgagcttgttgataaggatcctctatgacctctcgtgccaagatattccgcccgtcatcgagacacacctgcaacccatcaccgtgctcctccacaagtacatcacctacacaaaccccatctttgacggcgaggaggatgaggcgacgccgctcgagacactcaagtcggacatctgcgacgtactccagctctttaccaacaagtacgacgacgactttggccaattcgttcaggagttcacaaacaatgtctggaacgtcttgtcaagcgtgggtccggagaagagatacgacacccttacaagcaaagcgctgcagttcttgacggctgttgcctcggtgcgccgtcacgccgagattttcaacaacgagcaaattctgggcacaattgttgagaaggtgattctccctaatgttgcgctcagggagtcggatgtcgaaatgttcgaggatgagccaatcgagttcatccggcgcgacctcgagggttccgataccgactcgaggaggagagcggccaccgacttcctccgcaagctccttgacaacttcgaacctcttgtcacgcaggtggtcttcaggtatatcaaccactacttgaccgttggcaagacggactggaaggcgaaggacacggccgtctaccttttcctagccatcgctgccaagggtgccgtcactgccgcacacggcgtcaagacggtcaacagcttcgtcaatgttgttgagttctttgagcagaacatcgccgcggaccttctcaccgagtcgaccgaaccaatttcgaaagtggatgccatcaaatacctatataccttccgcagtcagctcaacaaggctcagtgggccagcgccatccagcctctcattcagaacttggcctcgtccaattacgtcgtctacacttatgcggcgatcgcagtggagagggtgctattcctgaccgatgagcagggccagcacttgttcccgcggagcgatatccaaccgtatgccaaggacctgctggaacatttgtttgccctgattgagaaggacacatcctctgcgaagcttcaggagaatgaattcctgatgcgctgcatcatgagggttctgatcgtcatgaaggacgggatccttgagtgtggggctgagggtgtcctgaaccacttgatcaacatcaccaacgtgattaaggagaaccccagcaacccgcgtttctattactaccactttgaggcaatcggtgcccttgtgaggtactgcggtaactcgcctaagctagacatgcttccccggttgtggacacctttcgtggccatccttcacgaggatgtttctgaatttgttcccttcatcttccagatcttcgctctgctcctcgagctcaaccctacgaaccaagtgcccggcgacttcaagctgctcattgaggcggtcctcgcacctgggccgtgggagacgaggggcaacgtgccacctctgtcgaggttcatcgctgccatcattcccaaggctgcagaggaaatcaaggccgagaacaaactggagcccttccttgccatattccagcgcttgctgacgggcaagaaaacggaccaaaatgcatttgacattctcgaagctatcgttggcactttccctggcgatgttttggagccttactttgggacaattatcacgctcatcttcaccaagctgcaatcgaacccgaccgactcgtacaagtctcgtgtggcccgcttttatcacttggtttcggcgcgcgggggcgaggccaggatgggcgccgacttcttcatcaggcatgccgaggccatccagcagaatgtatttacgcccttctacctcaccgtcatcctgcccacgacgggccagtttgcccgtcctgtcgaccgcaagctcggcgtcatctcgtacaccaagacgctgtgcgagtcgaagcagtttgccgagcgctaccagaagggttggggcttcacgtgcaacaaccttctggatctgctcaagaacccgccgcgcgtggccgccgggtttggcgacgagattgtcaacgaggcggacgtggacgatatagggtttggtgtcggcttcaccccactcaatacgtgcaagcgcgggtcccgtgacgacttccccgatatcgtggaggtggacaagtgggttagtcagtatttgaaggaggcgaaccagcgccttggcggcctggtggccactttcgtcgagcagcggctgacgcctgaggcgaaggccgctttggcgccgtacttggcttaa

SEQ ID NO: 3569 - protein, 957 aa, Myceliophthora thermophilia
MASTLDHLAQLLNATLDAQSHPENALKEESKKPKYSLSLLSIVNADAQPLKIRLAAALAFKNFIRHNYVDEEGNYKLPLDEVQTIKSELVGLMISSPPTIQTQLGEAISIIADSDFWERWDTLTQDLVSRLSNTDYKVTNGVLEVAHSIFVRWRPLFQSNELNREILHVVGVFGEPFVQMLSIADGQIEANKDNASALKGWLETMSLLIRILYDLSCQDIPPVIETHLQPITVLLHKYITYTNPIFDGEEDEATPLETLKSDICDVLQLFTNKYDDDFGQFVQEFTNNVWNVLSSVGPEKRYDTLTSKALQFLTAVASVRRHAEIFNNEQILGTIVEKVILPNVALRESDVEMFEDEPIEFIRRDLEGSDTDSRRRAATDFLRKLLDNFEPLVTQVVFRYINHYLTVGKTDWKAKDTAVYLFLAIAAKGAVTAAHGVKTVNSFVNVVEFFEQNIAADLLTESTEPISKVDAIKYLYTFRSQLNKAQWASAIQPLIQNLASSNYVVYTYAAIAVERVLFLTDEQGQHLFPRSDIQPYAKDLLEHLFALIEKDTSSAKLQENEFLMRCIMRVLIVMKDGILECGAEGVLNHLINITNVIKENPSNPRFYYYHFEAIGALVRYCGNSPKLDMLPRLWTPFVAILHEDVSEFVPFIFQIFALLLELNPTNQVPGDFKLLIEAVLAPGPWETRGNVPPLSRFIAAIIPKAAEEIKAENKLEPFLAIFQRLLTGKKTDQNAFDILEAIVGTFPGDVLEPYFGTIITLIFTKLQSNPTDSYKSRVARFYHLVSARGGEARMGADFFIRHAEAIQQNVFTPFYLTVILPTTGQFARPVDRKLGVISYTKTLCESKQFAERYQKGWGFTCNNLLDLLKNPPRVAAGFGDEIVNEADVDDIGFGVGFTPLNTCKRGSRDDFPDIVEVDKWVSQYLKEANQRLGGLVATFVEQRLTPEAKAALAPYLA

SEQ ID NO: 3570 - DNA, 1941 bp, Myceliophthora thermophilia
atgtcgtcctcagtctttttcaagttcaaatctcaaaaggagcccactcgcgtggagttcgacggaacaggcatttctgtctttgaattgaagcgtgaaatcatcctacggagcggactcggcgatggaaccgacttcgacctcgtgatatgtgccgatgagggcatgaaggaggtatacgatgatgatacgaccatcatcccccggtcaaccacggtcattgcccgacgtatgccccccaaggtccccggtagaggaggggctgcccgctatgtgtctggcaagatgccagtgcacgcaaagaactcgtcacggcgggagcaaattgtgaaacccgccaccaaggcacagtccaataccctggcgcaacttagcagtgcgatgacagaggaggaaaagatggcagcagtctttcaggcacagactgagaactttacttctcgagaagaagagatggccacccagcaatacgtagcaaagggaggccccaagaagccagccaatgtccccgatcatgaccctcctcagggttacatctgctatcgttgtggtgagaaggggcactggatccagctatgcccaacgaacgacaacccggagtacgacaaccgtccgcgcgtcaagcgaactacgggcattcccagatccttcctcaaaacggtggacaaggcaacagcgttgggccagaatgccgacggcagtgaatcgaagccgccttccggcatcatggtcaatgcggacggggagttcgtgattgctgagcctgacaaggcatcctgggagcagttccaggccaaggccaaggccaaccctaccgcacaaaaggccgctgccgagggggacaaggatgtccgggagcgaggcttggagtgccccatcgacaagaaaatgttcatagagccaatgaagactccatgttgtgagaagacgtattgcaatgattgcatcacaaatgctctcattgagagcgacttcgtctgcccggcgtgcaaagccgagggcgtcctgatcgatgatctaaagacggacgaaggggctgtggagaagatcaaggagtttctcgctgaaaaggatggtaagaaggaagggcctaaaagtcctgtggagtcgaaatcaccagttgccgctgctgccggagatgaaaccgacaagaccaacacgagcaaagcaaaatcgaaatcgccgtcaccgaagcccgcagccccggccaccacacaagcaaaccagtcgtcaacctcaacagcggggatcgccgcgtcgacacccgccacgggcgagaatcaaccttccaagaagcggcccgccgatgacattttggagaaccctaaaatccccaaggcaccaaaggcaatgcagaaggcacaggagcttcagcagcaaagcatgatgccaatgatgaacgggatgccaaacatggcaggcggcatgcccggtatgcccggcatgaacggcatgatgcccatgatgtacggtggcatgcccatgatgggcggcaactttggccccatgggcgggatgaacatggccatgatgaaccccatgatgaaccccatgatggctgggcccatgggggccggcttcggcggcatgaacaacatgggtggtggtgcgggcggattcaacggcagctggggcggtcccggcggcaacggcggcgcgaatatgggcggcgctgcgcggatgaacgggatggggatggggatggggatggggatgggtggcggattcggcggcggcgctcagcaacaacagcaattccagcagtcgcagcagggccaaggccgagcgcaacagcaattcgggaactacaaccacaacaataataactacgggtatcagcctaccgaggaggaagacgcctacttccgaaagccggtgaatccgcaccggcatcagaatcggcagcgccgcatccggccgagcgattacagggaactctga

SEQ ID NO: 3571 - protein, 646 aa, Myceliophthora thermophilia
MSSSVFFKFKSQKEPTRVEFDGTGISVFELKREIILRSGLGDGTDFDLVICADEGMKEVYDDDTTIIPRSTTVIARRMPPKVPGRGGAARYVSGKMPVHAKNSSRREQIVKPATKAQSNTLAQLSSAMTEEEKMAAVFQAQTENFTSREEEMATQQYVAKGGPKKPANVPDHDPPQGYICYRCGEKGHWIQLCPTNDNPEYDNRPRVKRTTGIPRSFLKTVDKATALGQNADGSESKPPSGIMVNADGEFVIAEPDKASWEQFQAKAKANPTAQKAAAEGDKDVRERGLECPIDKKMFIEPMKTPCCEKTYCNDCITNALIESDFVCPACKAEGVLIDDLKTDEGAVEKIKEFLAEKDGKKEGPKSPVESKSPVAAAAGDETDKTNTSKAKSKSPSPKPAAPATTQANQSSTSTAGIAASTPATGENQPSKKRPADDILENPKIPKAPKAMQKAQELQQQSMMPMMNGMPNMAGGMPGMPGMNGMMPMMYGGMPMMGGNFGPMGGMNMAMMNPMMNPMMAGPMGAGFGGMNNMGGGAGGFNGSWGGPGGNGGANMGGAARMNGMGMGMGMGMGGGFGGGAQQQQQFQQSQQGQGRAQQQFGNYNHNNNNYGYQPTEEEDAYFRKPVNPHRHQNRQRRIRPSDYREL

SEQ ID NO: 3572 - DNA, 429 bp, Myceliophthora thermophilia
atgactggcccagccgaggcaaaggaccgcataacctgccacgttctcgacacgacgctcggccggccggcgcgcaacgtgcgcgtcaagctggagctgatctcgaccgaggtggcgccgacgacgccgccgccgcatcgcgtgttcgagtcgcagacggacgacgacggccgcgtccgcgcctggctgccctacagctcggccacctcgtcgggcgaggtgcccgtgtgcacgctcgaggacgtgctcggcggcatccgcggccccagccgctggaccctgcgcttcgacagcgccgcctactttggcggcaccgacaagaccttctacccggaggtcgacgtcaccttcaccgtccgcgagggcgagcgctaccacgtcccgctgctgctggccccctatgggtactcgacctaccgggggagctga

SEQ ID NO: 3573 - protein, 142 aa, Myceliophthora thermophilia
MTGPAEAKDRITCHVLDTTLGRPARNVRVKLELISTEVAPTTPPPHRVFESQTDDDGRVRAWLPYSSATSSGEVPVCTLEDVLGGIRGPSRWTLRFDSAAYFGGTDKTFYPEVDVTFTVREGERYHVPLLLAPYGYSTYRGS

SEQ ID NO: 3574 - DNA, 582 bp, Myceliophthora thermophilia
atgcgcaggcccaagttccgcaggtctctctcctcgcgatacagcgacccggaagacatgatgccgcctattccacaaagcccgacacggatgtcgctccggcatagggacaccggctttcccgagtcgttttgtggcagccggaacacaaccctaccacaccctgaagcggttcttggcccggatgcctgcatcaccgaggacgacgtcaacccggtgcgggcccttctcaggtgccgcatgtcatatatggcccagcttcggtccgacagccgggcgtctaccttcgatgacggaagatccggcgggttatccgaggagggcacgctctctgccctcggttggctcgccatcaactcgctccgaacggccgagcttcctcgcctcgacgccttgctctcgtccaaagacgccgatggcgtcgagtcatcggacggcatgagcagtagtgacccggactcgccggtacaccgcgggagagagttcagcggccatcccaagacagacgcccgagaggcgatgggaaactcccggcgcgagcgacgcaggagcagcttcatcagcaggctgatgcacagatag

SEQ ID NO: 3575 - protein, 193 aa, Myceliophthora thermophilia
MRRPKFRRSLSSRYSDPEDMMPPIPQSPTRMSLRHRDTGFPESFCGSRNTTLPHPEAVLGPDACITEDDVNPVRALLRCRMSYMAQLRSDSRASTFDDGRSGGLSEEGTLSALGWLAINSLRTAELPRLDALLSSKDADGVESSDGMSSSDPDSPVHRGREFSGHPKTDAREAMGNSRRERRRSSFISRLMHR

SEQ ID NO: 3576 - DNA, 1506 bp, Myceliophthora thermophilia
atggtgactttgaacgacattgcgggcttaggcctgctccaaaatccttccgaagcagcgacgactgctcttgagcggagcgaatcaaactacaagtccctcgataactttgccctgccaaaagatcgccaataccaacagcagtttgccgacatttactttctccgtcttgcgaaaatcaagcccgccgtcgaggaggtagccagcgcagcatgggagggaaccgagctcggcggcgagactgcgacaaaggtggaccgagtgctggatgtgcggcagggccagttgtgctgggttgccggtacgatctacatggacatgccacttaaacccagcgtcctggaggatgttgccaaagaccgctggatttcggcccctacgacggcagaccactactattccgaagcgggcggcgagtcgatcatgctcgaggatgactccggccgcatccgccttgttggggacgtgctcaagagctacttcctcgtcacgggctgcatcattgccgtgatgggcaccgagaatgttaacggcgagttcgaagtcatcgatctgaagttcgccgacctccccccacagcccgaccgctgggctctctccaaacccgctgggagcgccagcaaaaagaccaaggtcaaagacgaagacgtcgagatggccgactcccaaccctccaaaaagatcgccatcgtctcgggtctcgaattctccggcaccgacacctcctacgcaatggaacttgacctcctcctcgagttcctcctcggcgaggccctcgacccggccgcccagtccgagctcgcccacatctcccggctcatcatcgccggcaactcgattgcgaagccctccgaacacgacgcggccgacagagacaagaagggtcacaagaagtacggctacgacgcctcttcctacaatcccgtcccctcccagctcctcgacaccttcctctccacgctcctccccaccatccccgtcaccctgctcccgggcgcgcacgacccagccaacgcgagctacccgcagcagccgatccactcggccatgctccccaccgcgcgcacctacacctctccgccggggcagtcgagagaggagcaacccggctggctcgacccggtcaccaacccctgggagggcgagatcgaggggtggcgggtgctgggcacgagcgggcagaacctcgacgacatctgcaagtacgtcgacaacagcgaccggctgggcatgatggaggccatgtgccggtggcggtgcagcgcgccgacggcaccggatacgctgtgggcctaccccttccaagaggacgagcccttcgtcatgaaggagtgtccacacctctactttgtgggctgccagcccgagttcggcaccaaggtcatcgagggccctcagggacagatggtccggctggtcttggtaccctcattcgcggccacgaaagagatagtgctgatagacaccgagacgctcgacgtgtcaaaggtgaaaatcacgatttga

SEQ ID NO: 3577 - protein, 501 aa, Myceliophthora thermophilia
MVTLNDIAGLGLLQNPSEAATTALERSESNYKSLDNFALPKDRQYQQQFADIYFLRLAKIKPAVEEVASAAWEGTELGGETATKVDRVLDVRQGQLCWVAGTIYMDMPLKPSVLEDVAKDRWISAPTTADHYYSEAGGESIMLEDDSGRIRLVGDVLKSYFLVTGCIIAVMGTENVNGEFEVIDLKFADLPPQPDRWALSKPAGSASKKTKVKDEDVEMADSQPSKKIAIVSGLEFSGTDTSYAMELDLLLEFLLGEALDPAAQSELAHISRLIIAGNSIAKPSEHDAADRDKKGHKKYGYDASSYNPVPSQLLDTFLSTLLPTIPVTLLPGAHDPANASYPQQPIHSAMLPTARTYTSPPGQSREEQPGWLDPVTNPWEGEIEGWRVLGTSGQNLDDICKYVDNSDRLGMMEAMCRWRCSAPTAPDTLWAYPFQEDEPFVMKECPHLYFVGCQPEFGTKVIEGPQGQMVRLVLVPSFAATKEIVLIDTETLDVSKVKITI

SEQ ID NO: 3578 - DNA, 297 bp, Myceliophthora thermophilia
atgtcccagctggtcaaatggggcgtgaacatgggcatccatacccaaaatttacccttcagcgttctcgacagttcagactcggaccttgatgacgacagcgactcagacagcgactcttccgacactgatgcgcacttcaccgatattgaaagcattcccagggcaggtgatgcggacaggcagccgcttttggccagacttcgccggcggaggagcttcgctgatgtgcttgctcgtgcaaagagcagtaggaaggagctgacgggggatcggaagcatcaagacagcgaatag

SEQ ID NO: 3579 - protein, 98 aa, Myceliophthora thermophilia
MSQLVKWGVNMGIHTQNLPFSVLDSSDSDLDDDSDSDSDSSDTDAHFTDIESIPRAGDADRQPLLARLRRRRSFADVLARAKSSRKELTGDRKHQDSE

SEQ ID NO: 3580 - DNA, 1380 bp, Myceliophthora thermophilia
atgtcgacgcaacaagcatacgagctcttcaagccccgcgacggtgacgagcccgaggatgtcatcttcaacagtctatacggcctccggtcgatcgagctcaaccggccaaagaagctcaacgccctcaatggctccatgatccgcaagatcgccccgcgcctgctcgagtgggccaagtcggacatggccaacgtcatcgtcatgaagggcgctggcgacaaggccttctgcgccggcggcgacgtcgcccagctggccaagtggaacaagtccggccccgagggccaggagctgtccaaggagtacttcgcccaggagtaccagctcgaccacttgatcgccacctacaacaagccctacatcgccttcatggacggcatcaccatgggcggcggtgtcggcctcagcatccacgctcccttccgtatcgccaccgagcgcaccgtcttcgccatgcccgagaccaccatcggcttcttccccgacgtgggcgcctccttcttcctgccccgcatgcccggctacgtcggcacctacctcgccctgaccagctcccgcctgacgggcgccaacgtcttctacgccggcatcgccacccactacctccactccacctcgctcccccagctcgagtcccgcctggccgagctgcgcttctccgactttgacagcctgcagaaccgcctggccgccatcaacgccaccatcgaggagttcgtcaccggcctcccccacgacgagcccatcctcctcggcggcgagctgcgccgcgccatcgaccgctgcttcagccacgacagcgtcgacgccatcctgcgcgcccttgagaaggagaagggcgccacccgccagtgggcccaggagaccctcgagaccctgcacaagcgctctccgaccgccgtgcacgtcgccctccgccagatgcgcatcggcgccaagtggagcatccgcgacaccttcatccgcgagcacgccatcgcctccaagttcatggcctcgcacgacttcaccgagggcgtcaccgccctgctcatcgacaagcggcccgcccgctgggagcccgcctcgctcgaggacatccccccggaggagagcgccaagctgaccgaggacttcttcctcatgccccgcaaccagcccacgctgcagctccttaccgaggccaactacgacgagtacccctacagcgacttcggcgtccccaccgaggagcaggtcgagaagaaggtcatgctgggcaccatgacgcgcgcccagatcgtcgacgccttcgtcaaggagaggaaccacaagcagggcgtcaaggaggtcgtcgaggagatcctggcccgcaagaccaccggcggacccaaggcggtcgccaagtgggtgtactaa

SEQ ID NO: 3581 - protein, 459 aa, Myceliophthora thermophilia
MSTQQAYELFKPRDGDEPEDVIFNSLYGLRSIELNRPKKLNALNGSMIRKIAPRLLEWAKSDMANVIVMKGAGDKAFCAGGDVAQLAKWNKSGPEGQELSKEYFAQEYQLDHLIATYNKPYIAFMDGITMGGGVGLSIHAPFRIATERTVFAMPETTIGFFPDVGASFFLPRMPGYVGTYLALTSSRLTGANVFYAGIATHYLHSTSLPQLESRLAELRFSDFDSLQNRLAAINATIEEFVTGLPHDEPILLGGELRRAIDRCFSHDSVDAILRALEKEKGATRQWAQETLETLHKRSPTAVHVALRQMRIGAKWSIRDTFIREHAIASKFMASHDFTEGVTALLIDKRPARWEPASLEDIPPEESAKLTEDFFLMPRNQPTLQLLTEANYDEYPYSDFGVPTEEQVEKKVMLGTMTRAQIVDAFVKERNHKQGVKEVVEEILARKTTGGPKAVAKWVY

SEQ ID NO: 3582 - DNA, 999 bp, Myceliophthora thermophilia
atggccgccgctcttgaagaagcccaggtcagctacgaggagctctcggacctcgagcaggagtttgacgacgtcgagaccgagatcatccgccagcagtatgccctctccaagccgctgtacgcgcgccgcgccgagctggtcgccaagatccccaacttctggccgctggtgctcgagcaggcgccgatggacattgacgagtacatccagccgtccgactcggccatcctgctgtcgtcgctcaagagcctctcggtgagccggttcgagctggacgaggatgagaagaacggcgacccgcgcagcatcgccatccgcttcgagttcgccgagaacgagcactttgaggacacggtgctggagaagaagttctggtggcgccagagcaaggacggctacgccggcctcgtcagcgagcccgtcccgatcaagtggaagcccggcaaggacctgaccgaggggctgctggacctggccaaggccgtgtacgacgagcaggtggcccagccgaagcaggacaagaaggacaagaaggccaaggtccccctgaccgagaagcagaaggccctcaaggagaagatggaccagaccggcatgggcggcgtcagcttcttcgcctggtttggctacatcggcgaatacatctctgccgaggagagcaagcaggccatcgaggaggagcgggaggagcggagaaagcggaaggccggtgagcccgtgcccaagaaggatgacgaggatgaggagatggaggacgacgacgacgacgacgagctcgaggaggaccttgacatcttccccacgggcgatgctgttgccatggccatcgctgacgatctgtggcccggtgccctcaaatacttcatccaagctcaggagcaggacggggctagcgagctcgacttcgagactgatgaagaagacgaggaggacgacgaggaggacgaggaggcggcgtcaaggccgcagaagaagcacaagggctccaagaactga

SEQ ID NO: 3583 - protein, 332 aa, Myceliophthora thermophilia
MAAALEEAQVSYEELSDLEQEFDDVETEIIRQQYALSKPLYARRAELVAKIPNFWPLVLEQAPMDIDEYIQPSDSAILLSSLKSLSVSRFELDEDEKNGDPRSIAIRFEFAENEHFEDTVLEKKFWWRQSKDGYAGLVSEPVPIKWKPGKDLTEGLLDLAKAVYDEQVAQPKQDKKDKKAKVPLTEKQKALKEKMDQTGMGGVSFFAWFGYIGEYISAEESKQAIEEEREERRKRKAGEPVPKKDDEDEEMEDDDDDDELEEDLDIFPTGDAVAMAIADDLWPGALKYFIQAQEQDGASELDFETDEEDEEDDEEDEEAASRPQKKHKGSKN

SEQ ID NO: 3584 - DNA, 1848 bp, Myceliophthora thermophilia
atgggggtgccgttcgtcttggaggggatgaaatcagaggccaactacccggagtcccgggtgctcatcatcatgacgggcggtacgatctgcatgcagccttcagccgatggcttggttcccatgacgggttttctcgagaaggccatggctcctcggccgtcattcaacgataactccgacccttcagtcaaaatccacgcctacaaaaacggcgtcaagctgaccctcgacagcctccgaacccccccgagcgcctactcgcgccacattcggtatggcgtcctcgagtttcagcccctactcgactcgagctccatctcgtccacgggctggaccgagattgccatgaccataaaggagaactaccacattttcgacggtttcgtcatcctgcacggcaccgactcgctcgcttacacggcgtcggcgctgtccttcatgatgtcaaacctcggcaagccggtgatcttgaccggctcccaggcctccatctttgccctgcaatccgacgccgtcgacaacctgctgggttctctcatcatcgccggcacctttgtcatcccggaggtctgtctcttcttccaccacaccctcttccgcggtaaccgcacaaccaaagtgtcggcctcctcctttgaggccttcgacagccccaactgcgcgccgctcgccaaggtcacctcgctcggcgtcgacgtcaactggggcctggtccggcggcccactagcatcgccgggtttcaggtgaccaagtacctggacacggcgcacgtggcctgcctgcgcatcttcccggggatcaagcccgagatggtggattccgtgcttagggtaccggacctgcgcggcctgatcctcgagacgttcggcatgggcaacgcccccggcggcgtcgacggcagcctgaccaaggtcatccgcgccgccgtcgagcgcggcatcgtcgttgtcaatgtcagccagtgcaccaacggcttcgtgtcgccggtctacgctcccgccaccgcgctcggcagggccggcgtggtgtttggacacgacctcactaccgaggcagccctgaccaagttgtcgtacctcctggcactaccgggcttgacgtacgaagacgtgacggccaagatggcgcagtcgctgcgcggcgagatgaccgagatgacccttccgtccttctctcacccggcgggcactctggatacggccgtgaacagacttactgcggccgaaacggccttcacggcgctcggctacgcgatccgcaacggcgagctgcgcacggtgcgcgagatcctcgagggggacgagttcaaccaccagctgctcaagcgggccgactacgcgggcaacacggtggtgcacctggccgccgtcgggccggagccgctcgtcctgcgcgagctgctcacgcgcggcgccggcgtgcactcccgcaaccgcgccggcaacaccccgctgtatctcgccgagaaggcgggcaacgccgagtgcgtgcgcctgctcaaaaaggccggggcccacctgtggctcgacaacgagctcaagggggagggcagccggatgccgagccgcggggcgagccgggctgtctccccagaccgtggtggcggtcgtggtgctgctggcgctgctcctcctagcgctgctgctgctactggtgctgcccccgctgctgttgatcccaaagggacggcggagggtggcagcggggaggttgaggctgtggttggcaaaggggatgcggggagggatgggcatgttggtgcggaagagcttggtgaattggctgcccagaccgagccggctagggtaccgctaacgggggacacgggcaagattgttggctga

SEQ ID NO: 3585 - protein, 615 aa, Myceliophthora thermophilia
MGVPFVLEGMKSEANYPESRVLIIMTGGTICMQPSADGLVPMTGFLEKAMAPRPSFNDNSDPSVKIHAYKNGVKLTLDSLRTPPSAYSRHIRYGVLEFQPLLDSSSISSTGWTEIAMTIKENYHIFDGFVILHGTDSLAYTASALSFMMSNLGKPVILTGSQASIFALQSDAVDNLLGSLIIAGTFVIPEVCLFFHHTLFRGNRTTKVSASSFEAFDSPNCAPLAKVTSLGVDVNWGLVRRPTSIAGFQVTKYLDTAHVACLRIFPGIKPEMVDSVLRVPDLRGLILETFGMGNAPGGVDGSLTKVIRAAVERGIVVVNVSQCTNGFVSPVYAPATALGRAGVVFGHDLTTEAALTKLSYLLALPGLTYEDVTAKMAQSLRGEMTEMTLPSFSHPAGTLDTAVNRLTAAETAFTALGYAIRNGELRTVREILEGDEFNHQLLKRADYAGNTVVHLAAVGPEPLVLRELLTRGAGVHSRNRAGNTPLYLAEKAGNAECVRLLKKAGAHLWLDNELKGEGSRMPSRGASRAVSPDRGGGRGAAGAAPPSAAAATGAAPAAVDPKGTAEGGSGEVEAVVGKGDAGRDGHVGAEELGELAAQTEPARVPLTGDTGKIVG

SEQ ID NO: 3586 - DNA, 2184 bp, Myceliophthora thermophilia
atggactttagcagcatcatccgaggggctctgccaaccctcgtaactaacagcagcactcatggcactaacacttcagccgagaaggggctcccagacagcctcttcttcgacaccctctcgccgctccttgggtttcatttcaacccgttggtgaagttgttcattatcttgtacaatctcgtcggcaaccgccttggcatcgacccgacctacatactgactgtggccggtttgttctgggccgcgaacaaggttctgacgcagctgtacgtggcactctacggcctggctcggcagcatttcatggccagcatcgaggtcagcaattcggatgacatttacttccatatgatgaagtggcttgcgtctcagcccaagatggtcaactctcgctccctcactgccgagacggcgtccaagggcgcctgggaagaggaggacgagtcagagctcacgtctagcctggtgtccgccagcggttctggcgtcttcctcaacttctccaaccaggaagccaaggcacccccccggttcacgccagccctgggcctgcacagcttctggttcaggggccgatacttccagctacacagaaagcaggagtccctgttcgagcccttggccgggggccacggcatacctcggttcaaggacaaggagagcctcgtgctctcctgcttcggccgctcccccgagccgatcaagctgctgctgcagcacgccaaggagcagtactacgtcgaccaccaggccaagaccattgtcaggcgcccggcgccccaagccttgcgccgctacggccatcgacactcgtggcagcaggtcgccaaccgtcccgtccggccgatgcagaccgtggtcctcgacgaggagcagaagatccgtgtcctctccgacatgaacgagtatctgcacccggccaccccgcgctggtacgccaaccgcggcattccccttcgccgcgggtacctgttccatggcccgccagggacgggcaaaacatcgctatcgttcgccctcgccggtgtctttggtctggacatctacgtcatctccctcctggacccgaccttgaccgaagaagacctgctcggcctctttacctcgcttccgcggcgctgcgtggtcctgctcgaggatatcgacacggccggcctcaaacgagccgatgatccggcctcgtcctcgtcctcttcgccttcatcatcctcctcctcggacgacgacgataaggagtccgaaggccggcaggacgacgacagcaaggagaagaagtccccaaagaagtccaagaatcacaacaagagggactggaaggtctcggacctcgcccgcgaactcaagcgggccggcaacaacagcgactcgggcgagaagaagggcatctccctctcgggtctgctcaacgccatcgacggcgtcgcctcccacgagggccgcgtgctcatcatgacaaccaacaagcccgaggccctcgacgaggcgctcatacgcccgggcagggtcgacctgcagatcgctttcaccaacgccagccaggagcaagccagggagctgtttgtgcgcatatacgagcccgagaacaccaagggaggctccagatccttcccaatctccgtctccgaccacctctcctccccgctgacgcccctcaccctttcctccgaaccccctccgacgccgctctcgctctcttcggacaaggacagcagcgtgaccgacgtgtccggcatcaccgaaatcggcgacgacgacgacgccgccacggacggcaagatacccgctccggcgcccctcgacctcaccgacaccgccgccgccgccaagagggacgccatcccgactgggcgattccccctggaacagcagcagcagcagcaccagcggggacaccaccaccgccccaaccagcgccgccacgaagagcagacgaagacgacgaagacgacgacgacgaggacgacgacaacaaccatccacccggccgagctcgcccacctggcggcgcagttcgccgcccgcatcccgccgggccagttctcgcccgccgagctgcagggcttcctgctcaagcgcaagaagacgccgcgccgggcgctcgaggaggtcgacgcctgggtggccggcatgctcgcgcaaaaggccggcaagacgcggggcctgagcctgtctgtgcagtga

SEQ ID NO: 3587 - protein, 727 aa, Myceliophthora thermophilia
MDFSSIIRGALPTLVTNSSTHGTNTSAEKGLPDSLFFDTLSPLLGFHFNPLVKLFIILYNLVGNRLGIDPTYILTVAGLFWAANKVLTQLYVALYGLARQHFMASIEVSNSDDIYFHMMKWLASQPKMVNSRSLTAETASKGAWEEEDESELTSSLVSASGSGVFLNFSNQEAKAPPRFTPALGLHSFWFRGRYFQLHRKQESLFEPLAGGHGIPRFKDKESLVLSCFGRSPEPIKLLLQHAKEQYYVDHQAKTIVRRPAPQALRRYGHRHSWQQVANRPVRPMQTVVLDEEQKIRVLSDMNEYLHPATPRWYANRGIPLRRGYLFHGPPGTGKTSLSFALAGVFGLDIYVISLLDPTLTEEDLLGLFTSLPRRCVVLLEDIDTAGLKRADDPASSSSSSPSSSSSSDDDDKESEGRQDDDSKEKKSPKKSKNHNKRDWKVSDLARELKRAGNNSDSGEKKGISLSGLLNAIDGVASHEGRVLIMTTNKPEALDEALIRPGRVDLQIAFTNASQEQARELFVRIYEPENTKGGSRSFPISVSDHLSSPLTPLTLSSEPPPTPLSLSSDKDSSVTDVSGITEIGDDDDAATDGKIPAPAPLDLTDTAAAAKRDAIPTGRFPLEQQQQQHQRGHHHRPNQRRHEEQTKTTKTTTTRTTTTTIHPAELAHLAAQFAARIPPGQFSPAELQGFLLKRKKTPRRALEEVDAWVAGMLAQKAGKTRGLSLSVQ

SEQ ID NO: 3588 - DNA, 2250 bp, Myceliophthora thermophilia
atgatcattaagaacctcgacaaaggaatcaagaccttcggccagaataatgcctttcgggcgattctcgactcggccagtccccagatatcagtccctttgtacttgcgctacgataatccaaccgccaggccgctgacttcacataatgccctgacgcacaatgtcgtcttgaaggttacggtgccaaagcggactggaaggaagcgcaaacggggcaccaacggcccctgggaatgggaagttgaacaacctagtgccgaggatccttccctcgtctccccagaagttctctcgcgggacaggctcgacactccgcgagttatccggcgcaaactccaggacaatgtaggcaaatacacggttgaaccggtcggtgttgtcaacaacacccaccggtacagaggcctggccgactttcagtattctctaggagagtccagattcatgaagcagttcgtcgagaaagtcctacccggcgacgtttccaagttgaaggagttctcccttcaacccgggatcgaatccgggaccaacatcgacctcatcccgcctccgtacttcacccctatcaccctccctttcagctacaactacgctcagaacccccacaccaaggagatcagtcttggtccctccgacgccacgggcgacctgtctgaggaccaagaatacggacgtgttgtcaacatcacgtcgcgcgcccccgccgccggctacttcatcgcgcacgacgagtacccggtcccgagcggcccgcgccgggagcccgacatgtccgacccgcaggtggccgccatcatcaccgagatgcggcaggccatggaggagcgtcccatatggacgcgccgcagtatgtggaaccggctgggggccaagttcgccgagctgcccaagaacggcggcctcgtccgccactgcctgcagtacgccggctaccaattcaagggcgggccctggcgcgacgccctcgtcaagtacggcctcgacccgcgctctgatcccaagtaccgcatctatcagacactcatcttcaagctgcacaagacgagcgtcggcagcgtcggccgctcctggcaggcgctgcggcgcaaggagattggcgtctccaatttcggcaaagcgtggaaggacatgggcgctggagacgacgcgatgctcaacacgcacatcttcaacggcgagtcgttcagcacggacggcaaggtctggcaagtctgcgacatcactgatccgcttctggccaggttgtttgccgaggccgaggtgcgccccgagtgcgacgtcgagatcagcggcttctaccaccgcgcgctgtggtccgtggccaaggccatcatgaagtgcaaaatggtcgctatccggttcaatcgcacgctgacggacagcgacttcagcgccgcgctcgaggccgtcaagaacgtgccgcacgatggcggcggcggcgggggtagcggatccggaagtagcatcggtatcagcctgcccgacctccagttgacggcagccgagtatgagcagcttcgcggggggaagtaccgcccgcggcccggcatcaagtcctctggacgcgaggtcgtggacggggtaggacgccggcgaagaacgcattatcgcgtgcggatcccgcttaaggagacagaggagcgcgaggcggtcaaaatgatcaagctacttacacataacacgcaggacaaggaggccgcgggtgaaacaagtgccgcggccaccgaggcggaaggatcgaccccgggcgaggaggtgttacgtgaggctccagctggagcaacagatcaagacgtcaggctcgccaggacagggggagaagagcaagatgagaaggacgaaggcgaagaggagcgaacagagggacgtgcgttccaagaagtcttggaagacatggacgaagaggacagtgaggaggaagacgaggaggagggtgacgagagcgaagagggtgaggaaggcgaggagatggtaccccagaagaagtatcccttccaccaggagaatgaatcagaagacgacttggaccaggaggaggagtacgaggagggtgtgtattcggacgaagacgaccaggaggatatggaggacgaggacgaggacgaggacgaagatgaagacgagtacggcaggggagatgatgacgaggaggaggaattaggagaagagggcgagggattttcccaaacatgggaagacgacgatggtgacggtggggaggatggccaaggatactacgagtag

SEQ ID NO: 3589 - protein, 749 aa, Myceliophthora thermophilia
MIIKNLDKGIKTFGQNNAFRAILDSASPQISVPLYLRYDNPTARPLTSHNALTHNVVLKVTVPKRTGRKRKRGTNGPWEWEVEQPSAEDPSLVSPEVLSRDRLDTPRVIRRKLQDNVGKYTVEPVGVVNNTHRYRGLADFQYSLGESRFMKQFVEKVLPGDVSKLKEFSLQPGIESGTNIDLIPPPYFTPITLPFSYNYAQNPHTKEISLGPSDATGDLSEDQEYGRVVNITSRAPAAGYFIAHDEYPVPSGPRREPDMSDPQVAAIITEMRQAMEERPIWTRRSMWNRLGAKFAELPKNGGLVRHCLQYAGYQFKGGPWRDALVKYGLDPRSDPKYRIYQTLIFKLHKTSVGSVGRSWQALRRKEIGVSNFGKAWKDMGAGDDAMLNTHIFNGESFSTDGKVWQVCDITDPLLARLFAEAEVRPECDVEISGFYHRALWSVAKAIMKCKMVAIRFNRTLTDSDFSAALEAVKNVPHDGGGGGGSGSGSSIGISLPDLQLTAAEYEQLRGGKYRPRPGIKSSGREVVDGVGRRRRTHYRVRIPLKETEEREAVKMIKLLTHNTQDKEAAGETSAAATEAEGSTPGEEVLREAPAGATDQDVRLARTGGEEQDEKDEGEEERTEGRAFQEVLEDMDEEDSEEEDEEEGDESEEGEEGEEMVPQKKYPFHQENESEDDLDQEEEYEEGVYSDEDDQEDMEDEDEDEDEDEDEYGRGDDDEEEELGEEGEGFSQTWEDDDGDGGEDGQGYYE

SEQ ID NO: 3590 - DNA, 3558 bp, Myceliophthora thermophilia
atggacggcgctgccccgccaaccggcgacctcgctaacctgagcctccaggacgacaaccagacccccggtgccgcgtcacccaatgtcatgatggtcgacgcgccggaggagcatgtcgtccacacgaatggcaccgagcccgaggacgtcgccatcatcaaccccgacagcatggatacagacgcacccctcctcgcaagcgactatgaggcgatgaaacagcatgtgctgccgccgctgccagaagaacccagagtcctggacgatcaggttcacacatggacggtcgagggatggcggtcattactcaagaaggagcatggtccgatattttacgccggcggttacccatggcgaatcctcctcttcccgttcggtaacaacgtccttgaccaatgctccatctatctcgagcacggcttcgaagcgaacaacgtcccggaggactggagctgctgcgtgcagtttgcgctcgtgttgtggaacaagaaccacccgcatatcttcttccaacattccgcccaccatcgcttcacaaaggaggagagcgattggggtttcacgaggtttctcgagacccgcaagatgttcaatcccgtctgggagaatgcggaccggccgcttatcgagaacgagtgtgccaacatcagcgcatacgtccgggtcgttgaggacgagactggcgtcttgtggcacaacttcaacaactacgactcgaaaaaggagactggttatgttggcctcaagaaccagggtgccacctgctacctgaactctctcctgcagtcattatacttcacaaatgccttccgcaaggctatctaccggatccccacgcaggaggacgaaagcatgcaaaacagcgcgtacacgctgcagagactcttctaccaactgcaaacctccaacacggctgtgggaaccaacgagctcaccaagtcctttggctgggaaacgcgccacatctttgagcagcaagacgtgcaagagctctccaggaagctcatggagcgcatggaagagaagatgaagggtaccgaattcgagaaggcgcttccacaattgtttagcggcaagatcaagacgtacatctcttgcatcaacgtgccctacgagtctagccgaatcgaagatttctgggacgtccagctcaacgtgagcgggaacgagaaccttctggagagcttccaggactacattcaggtggagaagcttgatggggagaaccagtacttcgccggcgaccaatacaagctgcaggatgcgaacaagggcgtcatcttccagtcattccctgacgtcttgcatctgcagctcaagcgcttccagtacgatatacagcgcgacgccatgatgaagatcaacgaccgctacgaattccccgaggagtttgacgcctcgctctacctggacaaagacgcggacagatcggagccttgggagtaccagctgcacggcgtcttggtgcacagcggcgacctcaacgccggccattactacgcctttataaagccgaacaaggaaggctggtggtacaagtacgacgatgataaagtcaccaaggcgacgaaacgggaagtgctcgaagaaaacttcggcggcccgttcaagttgcccaacggccaaatgcgcccccttggcaacaagaaaggccccatcatgaggcccaacagcgcatacatgctggtgtacattcgcaagtccaggctcgacaaggtcctctgtccggtcaccgaagaggacactccggagcatcttcggaggaggttcgcggaggagtacgctctccgggaggcgcggcgcaaggagagggaagagcagcacttgtatctcggggtgaaggccatcacagaagccacgttccagcaacatggcagtactgacctcaccaattttgatgcgacgccagatacagatccggcagcgccaaggttttaccgcctgcttcgcaccgcgccgatgcaggagctggtcaaccagatcgcggcggatatcggccaggatccgaaacatgttaggctttggatcatggtcaaccgtcagaataaaaccgttcggccggatcagcccgtcatggatctccgaccgactgtcgaggagacgtacaaccgagcagcggcgcatagggatcaagcacttcgcgtgtgggtcgaagttgctgaggaattcaatgccgacggcacggctgtgtggccgacatatgcccctgggctggcgaacggggctgtcgtgaagaacgacctcatcctgctcttcctcaaacgattcgacgcggacgcccaggagttgaggggtgttggccatgtttacatgagcaaggagaagaaggttgaggagctgatcccagtcatcatgaagaagatgggctgggacaagctgtcaagtgacgagaagatccaactctgggaggagatcaaacctaatatgattgagggcctcagagggaagcagtctctcaagtcggcagagctccaggacggagacatcatctgcttccagcggattcatgagcggaagccaaagctgagtctgggcgacaagaacgacaagcaatcatccgaggaggtaaaatcgttggaccgttctgaggatgcccgagagtactacgacttcctcctccataggcgggtcgtctggttccgcgcccatcctcagaaatgcgatgccgagacttataaggattttgaaatggttctgaactccaagataagctacgacaagctgtcagagaaggttggcgagaagttgggagttgaacccacgcatcttcgattttacacggtgaatgccagctccgggaaccctagggcggcggttaagagaggccagaaccaaacactccagaacattctcgtcccggccggctacgggcaattaaacatgaatcagcgcaacgacgccttgttcttcgaggtgctggagatgagcctcgccgagctagacaccaagaaaagcatcagaatcaccctcctcagcgagggaatcacgaaggaggagcaattcgacgtcttggtgcccaagaacggtcaagtgaaagaccttatcggctgtttgactgcaaaggcgaagatccctagcgaggaagagggggggccgattcgggtctacgaggtcagcaaccacaagttcttccgagagctggagcggacctatcccgtcatcagtatcaacgactacacgacggtgatagcggagcggataccgcccgaggaagtcgaggccgaggacccaagggacttcatctcggtgttccagttccatggcgaacccagcaaggcgcacggcatcccgttccgcttccttctcaaggagggcgaggtgttttcggagaccaagaagcggctcgaaaagcggacgggactcaaaggcaagagcttcgagaagatcaaattcgctgtggtccgcagggcgcaattctcaaggccgcagtacttgaacgatgacgactgcctctgggaggtggccgcgaacccggatgactcccttggcttggaccatcccgaccggacacgggcggtgcggaacggcgccggggacctgtttctcaagggctag

SEQ ID NO: 3591 - protein, 1185 aa, Myceliophthora thermophilia
MDGAAPPTGDLANLSLQDDNQTPGAASPNVMMVDAPEEHVVHTNGTEPEDVAIINPDSMDTDAPLLASDYEAMKQHVLPPLPEEPRVLDDQVHTWTVEGWRSLLKKEHGPIFYAGGYPWRILLFPFGNNVLDQCSIYLEHGFEANNVPEDWSCCVQFALVLWNKNHPHIFFQHSAHHRFTKEESDWGFTRFLETRKMFNPVWENADRPLIENECANISAYVRVVEDETGVLWHNFNNYDSKKETGYVGLKNQGATCYLNSLLQSLYFTNAFRKAIYRIPTQEDESMQNSAYTLQRLFYQLQTSNTAVGTNELTKSFGWETRHIFEQQDVQELSRKLMERMEEKMKGTEFEKALPQLFSGKIKTYISCINVPYESSRIEDFWDVQLNVSGNENLLESFQDYIQVEKLDGENQYFAGDQYKLQDANKGVIFQSFPDVLHLQLKRFQYDIQRDAMMKINDRYEFPEEFDASLYLDKDADRSEPWEYQLHGVLVHSGDLNAGHYYAFIKPNKEGWWYKYDDDKVTKATKREVLEENFGGPFKLPNGQMRPLGNKKGPIMRPNSAYMLVYIRKSRLDKVLCPVTEEDTPEHLRRRFAEEYALREARRKEREEQHLYLGVKAITEATFQQHGSTDLTNFDATPDTDPAAPRFYRLLRTAPMQELVNQIAADIGQDPKHVRLWIMVNRQNKTVRPDQPVMDLRPTVEETYNRAAAHRDQALRVWVEVAEEFNADGTAVWPTYAPGLANGAVVKNDLILLFLKRFDADAQELRGVGHVYMSKEKKVEELIPVIMKKMGWDKLSSDEKIQLWEEIKPNMIEGLRGKQSLKSAELQDGDIICFQRIHERKPKLSLGDKNDKQSSEEVKSLDRSEDAREYYDFLLHRRVVWFRAHPQKCDAETYKDFEMVLNSKISYDKLSEKVGEKLGVEPTHLRFYTVNASSGNPRAAVKRGQNQTLQNILVPAGYGQLNMNQRNDALFFEVLEMSLAELDTKKSIRITLLSEGITKEEQFDVLVPKNGQVKDLIGCLTAKAKIPSEEEGGPIRVYEVSNHKFFRELERTYPVISINDYTTVIAERIPPEEVEAEDPRDFISVFQFHGEPSKAHGIPFRFLLKEGEVFSETKKRLEKRTGLKGKSFEKIKFAVVRRAQFSRPQYLNDDDCLWEVAANPDDSLGLDHPDRTRAVRNGAGDLFLKG

SEQ ID NO: 3592 - DNA, 5316 bp, Myceliophthora thermophilia
atggattatgcgcgccttcgcgctgccgccctgagcggtgaggacgaggaggcggttacggtcgacacccgagcgctcatcgacaaggttctcgcacgatactcgggagaatggacaacccttagagagctcattcagaatgctgccgatgcgcaggctacaacggtcaagattaagtgggaaacgattccgtcgacacaggttccgctcccaacaacaaccaaccagtccgaacttgttaagcatgtcatctcgcaccacaccctgcggcggcttgtcgtccagaataacgggcaaccattttctcagacggactggaggaggctgaagaagattgccgagggtaatcccgacgaaaccaagatcggcgccttcggcgttggcttctacagtgtctttgccgactgcgaggagccgttcgtcagttctggggacgaggccatggctttctactggaaagggaacgcgttatttacgaggaaggtcactctcccgcccggcgagggaagcccggacactacctttgtgctcgactacaggaatactaccacgccgcttccaaacttgctctccgtcagccagttcctcgcgaccagcttgacatttgtggcgttgcaaaacgtcgagttttggatcgacgactggaagcttctggagctgcacaagaagctgtctccgtctgtgaatttgagcattccgcgagacttggaaaccaggaccaaagaaggactcatggaactcgtctcggcagaccaaaccagtgtacagattgacgctacgtttatgagtgtcattggctggaagccgcagctcgcggcatcagcgacgaaatctaacgagtcctatactgaattgccttcactgaagaactttttttctaggcttacttcaggctcgtcttattcctcatctcgaaccaaagccgccaaggaagaaagggcgattcaggacgcaatagcagaggatcttacagccaagtcgacgtcggtcatttttcttcgcgtagtctcggcccagatagccacccgcatctcctcctcttttgctgccgaactggagcgggcgaccaagaagcctcctccgaagaagaccaagatctccattctgacttcatcgtatgatgagactgtcgcctcggaggaggcctcgtcgacccaggcgtctaagatcgctgatgtatttgtctctgttctccccagcaaaaagccgggcgggcgtattttcatcggtttcccgactacgcagacaaccggtgctgggatgcacatatcggcgccatctgtcattcccacagtcgagcgcgaagccatagatctgaacgcccgctgggtacggtcctggaacatggagatgctgcgggcagcaggcatcgtgtctaggcttgcgtataccgacgagatgtcgtgcctggataagaagctcaggaacatgtgcgaggccagcggaaagaagggagcggccatatcctcggatcttgtgcaaaagtgcatccccgaagccctgcacatcctgaagacgtacactttccgggattcaacgccaagtgcactggtctctcagaccatcgaagaggccttctgggtagcatctaagacttttagcgcggatgtcttctcttcccgcggagtgctcccggcgaagaaggttcgcacatcatctgatgaaattgccaaattcgtcggcgggattccggttgtgctcaaggagatgaaggacgacccattcattttgcgcctgatcgatttcggactcatcaaggaaatcaccgtcgatgatatctgtcaggaactcaatacccaaccgctgaacaaggtccagctcaaccacttcctccagtggatcaccaagggcgcttacaatggagacattgaccctcccagtgtccagcggctgctggacgtcgccgtcgcgaccatcaccgacagtggtgattccggcgatatcattgccctcggcacaatcaagaactatcccaacagcagaattccggcgagtctcccattgccgcctactacactccccatcgcctttactgcgaacatcccggaaaacaagctccaagctctaggctgggaacctctgggcgtggtcccttggttgaggttcctgatcgaatctgcccctaggagccccgacgagcagaacctgaccaagtcggccaagttcgctcttcaagtcctgacggttctttcgaagaattgggacaacttgagctcgagctccaaagcgtctgtcgtctctgcggtgcagcatatcaccatcatgcccaccaaggcaggcttgaagaagcctgaggactcgttcttcccatccgtgaagctctttgacgacctcccgacgctcgagggctgcgggaatctcaaggaaaaatttctgacagcgctgggcgtgagaaagactgtcgatctcgacacaatcttcacacgattattgagcccctcgccggcggctggcgatggcgcgcatgcgagatggagccatatgcagctgatcaagtatctcgcttccgtcaaggacgacattcctctggccgatatgaagaagctccgagaatcgccgttgtgtccagctgaagctgggcccccgggaatggagcccacaaagggcaccagccggctatacaaggtatcggagctctacgagcccaaagactcgttacggtctcttggactgcccatcctacactggccgggccctccaggcagtttcaggaataccagcccggaggcgcggttcttgtatgctctcggattacgtccgttcccgaccgttccggagcttgtggacatgatgtcgtcgtcagatgacaagcttcgagcgaacgccatggcctactttgtcgggaatcatcatctcaacggatacaccgggtttgacttgtccagttcagagaagtgcttccttccggtcgaaggcaaggagaaacagttggttcagccatctgcctgctacacgaatgagagggcggctgttcttgggtatgacattctcaggcgagatttgcaccaacacgccccgaaatttggcgttgcacgcgatcctccgattacaggttgtgtggagcgacttatcgcgaagccgccccaggaccggaccatggccatcaagctgtttgagtactttgctacccggctgggagatctaggccacaatagcctggtgaagttgagggatgctgctatcatcccagtgatgaggcaacaggatagccgagaagggtccgaggacaaggccaggtcaaaactggtctacatccggcctactcagtgttacctgggaagttcatcaacatacaaggacatctttgactttgtcgattttgggggtgacgcaaataccttcctgttcaagtgcggtgccaagatcgagccaacgaagcatgagattgcacagctggcttgtactgagcccgcgcggttgctgagtgtcctgcagagccccgagaagtacctcaaccttctcaggtcgatcgcggaggacatgtcgactctcaagagggacaaagagcttttcaggaaaatgcggacatcgccatggctgctcggctcccgggaactgtcgtcagggaagaacaaggaacccgaggcagcggaagaggaggatgctccgatcaagcactaccagctcgctacagccgatagcattgtcattctcgacgattacattagctaccggctgttcaaggaagcgctgctctgtgccccggaggatgatctcttggaggccttttacatggccctcggctccgaatcactgggcagtagagtccgggaagaactgtcggtaggacagcggacgcgagatcagagtggcgccgagtggctccggaagcacgtgctcgaacgctcgaagctcttcttgcatgagtactcaaaggacaagcgtgatgccatcaaacacggcactcattggctggaaaagaacctgcaagtgacgacggtctcgtcgctcgccctgcggcggtcgctgaagggtcacgccaagacccaccaggagaaacggtcagcggccagttcccagacggcgaatggatggatgctgtacgtcgccgccgaggagaagaagccagatatgtaccaagtcggccacgccatctgtcaactcctgctgaagcgccctaatcagcacgcttacttcttcttcgagcctttcctgaagcttggcttgctggagctgcgagcgcgcgggtacaacgtcgaccggatcctgcgcgccaaagccgctgaagctcggctggtggaggaagaacgtcgcagggcgctcgaggcagagcagaggaggatccaggagcgcgagaaggaatgggcggctcaggacgcgccccaggatgccgtgaccccccagcgagcgcgcgaccgcatgccaggcagtttcgacgattccccggaaccttcgacgagcgccggccttccgccgccacagcagcagcggccgaagaaaggcggcagcctattcacaaaccttacccgccgcttggggttcgatacgtctgatgacactcccccgtcacccacccattcggagctcgataagttcctccctcctccaccgcctggctcgaccgggggtggcggtagcggcaccaagccgacggatgacggcaaccgtgtcacctcgcccgcaaccatccagcaaaacctcctcaacgcgatcaaggccacacgggcgcacgattcgtcgacgctctttgcgccgcctcaccagaccgtggtgcaggaacagacgacgtactgcgacagcacgccggcccagaacatggccttcgccgcggaagcaccgcgtggcatgcgcgtgttcctgtccaaagaccacccgggcgactcgggccagtttgtggcggcgcacgtggacgggatcgcgcggttcgaggcgctgctgcgggacgtggcggccgtgtacgggctgagcgaccgggcgctgcacatcttttacgacgagaggggcaagacgatcgcgttcaacagcaacgggagcgtgttttgcaacctgcgcttctgggagcagctgcacagcagggaggggatgcagagcgggcagggcagggtcgaagctacgacgtggtggtgggtcgtggtggcgcacgagctggcgcacaacctcgtgtccgtccacgggtcggagcatagctattacacggagtcgtttgtgcaacagtactttcccaagatgatggccaaggcggcaggctggatggcgggcgcggctggtcccgcggtcgccgccgccgccgccgctgctccgccgtctgcggctacggatggggcaagtcccgacgtgcaggagtcgccgccgccttactcgccctttggcttttga

SEQ ID NO: 3593 - protein, 1771 aa, Myceliophthora thermophilia
MDYARLRAAALSGEDEEAVTVDTRALIDKVLARYSGEWTTLRELIQNAADAQATTVKIKWETIPSTQVPLPTTTNQSELVKHVISHHTLRRLVVQNNGQPFSQTDWRRLKKIAEGNPDETKIGAFGVGFYSVFADCEEPFVSSGDEAMAFYWKGNALFTRKVTLPPGEGSPDTTFVLDYRNTTTPLPNLLSVSQFLATSLTFVALQNVEFWIDDWKLLELHKKLSPSVNLSIPRDLETRTKEGLMELVSADQTSVQIDATFMSVIGWKPQLAASATKSNESYTELPSLKNFFSRLTSGSSYSSSRTKAAKEERAIQDAIAEDLTAKSTSVIFLRVVSAQIATRISSSFAAELERATKKPPPKKTKISILTSSYDETVASEEASSTQASKIADVFVSVLPSKKPGGRIFIGFPTTQTTGAGMHISAPSVIPTVEREAIDLNARWVRSWNMEMLRAAGIVSRLAYTDEMSCLDKKLRNMCEASGKKGAAISSDLVQKCIPEALHILKTYTFRDSTPSALVSQTIEEAFWVASKTFSADVFSSRGVLPAKKVRTSSDEIAKFVGGIPVVLKEMKDDPFILRLIDFGLIKEITVDDICQELNTQPLNKVQLNHFLQWITKGAYNGDIDPPSVQRLLDVAVATITDSGDSGDIIALGTIKNYPNSRIPASLPLPPTTLPIAFTANIPENKLQALGWEPLGVVPWLRFLIESAPRSPDEQNLTKSAKFALQVLTVLSKNWDNLSSSSKASVVSAVQHITIMPTKAGLKKPEDSFFPSVKLFDDLPTLEGCGNLKEKFLTALGVRKTVDLDTIFTRLLSPSPAAGDGAHARWSHMQLIKYLASVKDDIPLADMKKLRESPLCPAEAGPPGMEPTKGTSRLYKVSELYEPKDSLRSLGLPILHWPGPPGSFRNTSPEARFLYALGLRPFPTVPELVDMMSSSDDKLRANAMAYFVGNHHLNGYTGFDLSSSEKCFLPVEGKEKQLVQPSACYTNERAAVLGYDILRRDLHQHAPKFGVARDPPITGCVERLIAKPPQDRTMAIKLFEYFATRLGDLGHNSLVKLRDAAIIPVMRQQDSREGSEDKARSKLVYIRPTQCYLGSSSTYKDIFDFVDFGGDANTFLFKCGAKIEPTKHEIAQLACTEPARLLSVLQSPEKYLNLLRSIAEDMSTLKRDKELFRKMRTSPWLLGSRELSSGKNKEPEAAEEEDAPIKHYQLATADSIVILDDYISYRLFKEALLCAPEDDLLEAFYMALGSESLGSRVREELSVGQRTRDQSGAEWLRKHVLERSKLFLHEYSKDKRDAIKHGTHWLEKNLQVTTVSSLALRRSLKGHAKTHQEKRSAASSQTANGWMLYVAAEEKKPDMYQVGHAICQLLLKRPNQHAYFFFEPFLKLGLLELRARGYNVDRILRAKAAEARLVEEERRRALEAEQRRIQEREKEWAAQDAPQDAVTPQRARDRMPGSFDDSPEPSTSAGLPPPQQQRPKKGGSLFTNLTRRLGFDTSDDTPPSPTHSELDKFLPPPPPGSTGGGGSGTKPTDDGNRVTSPATIQQNLLNAIKATRAHDSSTLFAPPHQTVVQEQTTYCDSTPAQNMAFAAEAPRGMRVFLSKDHPGDSGQFVAAHVDGIARFEALLRDVAAVYGLSDRALHIFYDERGKTIAFNSNGSVFCNLRFWEQLHSREGMQSGQGRVEATTWWWVVVAHELAHNLVSVHGSEHSYYTESFVQQYFPKMMAKAAGWMAGAAGPAVAAAAAAAPPSAATDGASPDVQESPPPYSPFGF

SEQ ID NO: 3594 - DNA, 1086 bp, Myceliophthora thermophilia
atgcccttctcgccgccacgcgacacgagggagaaagatatccgatggcaagcctctgccaaggtcggatgtcgcgacagcagacctctgtggacagactactggcagcggttcaacaccatcaccattccgctgcttgatgaggatgcctttttttccgacgccctcgccgccgagaaagtggcccaggatcgcagacatctcgaagaactccttgagaagaaatccaaggagcgccgcgccgagcttgagacagtcgtcgacaagatcctgtacacggcgatgtttgacaagaaccccttctcaccagaggctgcctgggacgctgtggacaaagtcgggcggtccgggagtctggatagctttatccagttggccagtggcatcatctggggctggggggagagacagctaggcgagcgcagaccacggcgtgagcgctcgccctcgccttgcactttcaccgaaacgcaggagatgccccacatgtactcgccctatcctatagtctccgacaactgggatctcttacatcatgatatgggcccttcggtcactgagttaccggcctcgccagaacagcggcagctaccaccaccaactttagcaccctgtggcacggcggcacgagtggaggatatcgagaccacggatggcgttggatatagcgccctggagtggtcgcgcaaaccaccgaaggcatcatcagagatggaaccagccgttagagcacctcgggagagtcctacaatgtcacagtccgtcaccgtcaacagttctccaacagaccctgctttgccaccatcccctagcgacgctcgcccctcactcacagcgtcccaaactacgcccacaacgcctccagatcctcccagcgatggggaagtcgacatgccacagccgctacttttcacgcagccctcgagccctcaacgggaagggggccaagaaccaggtgccgatgcttgtcgggctagcctgggtggaaagtccaagccaaggggcaagaggcggtttcacgagctggaaggctcggatctcgaaaatgcagcgtatgttaaacgggcggggcgagaacttgggtaa

SEQ ID NO: 3595 - protein, 361 aa, Myceliophthora thermophilia
MPFSPPRDTREKDIRWQASAKVGCRDSRPLWTDYWQRFNTITIPLLDEDAFFSDALAAEKVAQDRRHLEELLEKKSKERRAELETVVDKILYTAMFDKNPFSPEAAWDAVDKVGRSGSLDSFIQLASGIIWGWGERQLGERRPRRERSPSPCTFTETQEMPHMYSPYPIVSDNWDLLHHDMGPSVTELPASPEQRQLPPPTLAPCGTAARVEDIETTDGVGYSALEWSRKPPKASSEMEPAVRAPRESPTMSQSVTVNSSPTDPALPPSPSDARPSLTASQTTPTTPPDPPSDGEVDMPQPLLFTQPSSPQREGGQEPGADACRASLGGKSKPRGKRRFHELEGSDLENAAYVKRAGRELG

SEQ ID NO: 3596 - DNA, 180 bp, Myceliophthora thermophilia
atggagcaggaggaggaggaggaggaggaggaagaggaggagaggaggaggagaggaggaggacgtgaatcagcagctgctccatctctccgaaactctccatcaacttggtccactatcatcaacatcccgagcaagcccgagtccgaaaacctgccctaccgcataagggtagcgtaa

SEQ ID NO: 3597 - protein, 59 aa, Myceliophthora thermophilia
MEQEEEEEEEEEEERRRRGGGRESAAAPSLRNSPSTWSTIINIPSKPESENLPYRIRVA

SEQ ID NO: 3598 - DNA, 4011 bp, Myceliophthora thermophilia
atgcgttcctcgacgacccatcccccagcgaagccgccagactcgccggccgaccactccgacaccgatcttgagctcgatctcgaagagctcgacccccagaccgtctccggatccgaccagccgagggggagaggtcttttgggccagccgcgccagctccccgaagagcgagcacccaggatcgccctgcgcacgctgcggatgggcgggttacgacgcggcgccagacgcaacgggtacggcgagctaggccgcagccatgccgggggcgccgggggcgccgaggacgcccagggcccgcttcgggacgggtacgtaggcgaccggcggtattccgacgccagcgccgccggaggggacgatgcgccgctgctgagcgagcccggccggagctccagcaacaagcggcggggctccttcgccggcgacaggctacgccgagtcggcctgcggctccccagtttcatgtccggcgcgcccgcgaaccaggacaacccggacgaggagctcgacaaggaggaagacgacccgtcatcgtcgaggctagttgccgtcggctcgtcccaatcgacgcgcttcccgccaaacatcatctccaatgccaaatacacggcctggagcttcctgcccgtcacgctctacaacgagttctctttcttcttcaacatgtacttcctcctggtggccctgtcccaggccattccggcattgcgcatcggctacctctcgacctacgtcgcgccgctggcattcgtcttggttatcacactcggcaaggaggcgtacgacgatatcgagaggcggaggagggacaacgaggcgaattctgaggaatatacagtgttgcaattcgaggaacccgggagggcggcggtggcgggcgcgggtacgggtgcgggtgcgggtgcccgcctccggacaaggaaatcgacgctgacgtctgcgcggagagggcccaagcgcaatggggcggacgcgggcaggctctcggatatccaggaagaggaggagcagacagagggagacgggcgtcggaagccgccgggatgcgtcgtgtccgaagtcagcaagaagtcgcgagatctccgagtgggcgacgttctcaagctcagcagaggcgaccgcgtgccttctgacgtgatcattctgaaatgtctgtcgaacgacccggctgcgcagaaagccgaggaggggccggtccctcaggaagaaccgctgctgctcgaccatgcagccgaaaccgcgagaggcggtgcagcgaccgggacggccgatgaggagaatcccggggctgccgaggggggctcaaacggggagacgttcatcaggacagaccaactggacggcgaaacggactggaagctgcggctggcgtctccgctctcccagaacctcgctaccgaggagttcgtccgtctccgcgttaccggcggcaagcccgataagaaagtgaacgagttcatcggttctctagaactactcccctcgcgacaagacgccatgagcaccgccaccttctccccgaccgacgacgacgagggcgtcaaggcggtgtctctgtccatcgacaacacggcgtgggcaaataccgtcatcgcatcacacgccacgaccctggcggtcatcgtctacacggggccgcagacccgttctgcgctctccacggcgccatcccgttccaagacgggcctcttggagtacgagatcaactcgctcacaaagatcctctgcttcctcaccctggccctgtccatcatcctcgtcgccctcgaagggttcagcaacaccgagggcaacgtctggtacgtcaagatcacgaggtttctggtcctgttttcgaccatcgtccccatcagcctgcgggtgaacctcgacatgggcaagagcgtctactcctggttcatccagagagacccgggcatccccggcgccgtcgtcaggacgagcaccatcccggaggacctcgggcggatagagtacctcctcagcgacaagacgggtacgttgacccagaacgagatggagatgaaaaagatccacgtcggcaccgtgtcgtacgccaacgacgccatggacgaagtctcggcctacgtgaggcagggcctccacctccccccgccctcggccgatagccgggcgctggtgacgccctcgacgtctctgacctcggccgcgaacgtgggcgcgacgaggacgcgccgcgagatcgggtctcgggtccgcgatgtggttctcgccctcgcgctgtgccacaacgtgacgcccaccacggaggaggacggcgcgggccggctggtgaactcgtaccaggccagctcgccggacgagatcgccattgtccgctggacggagtcggtcggcctgcggctggcctcgcgcgaccgcaagagcatggtcctcgagtctaccgaggcgggccggcccgtggtcaaggtccgcatcttggacatcttcccgttcacgtccgagggcaagcgcatgggcatcatcgtgcagttctacgagaggctggagcccggcgtcccgggcccgacctcgggcgagatctggttctaccagaagggcgccgacaccgtcatgggctccatcgtcgcggcgaacgactggctggacgaggagacggcgaacatggcgcgcgagggcctccggacgctcgtcgtggggaggaagcggctgtcggcggccgagtaccaggagttctcggccaggtaccacgaagcgtccctggccatcagcggccgcgaggccggcatgcaggcggtcgtgtcgcggtacctcgagcgcgacctggagctcctcggcgtcacgggcgtcgaggacaagctgcaaaaggacgtcaagccgtccctggagctgctccgcaacgccggcatcaagatctggatgctgaccggagacaaggtggagacggcgcgctgcgtggccgtcagctccaagctggtggcccggggccagtacatccacacggtggccaagctgcggcgcaaggacgcggcgcgggagaacctcgacctcctgcgcggcaagaccgactcgtgcctgctcatcgacggcgagagcctgggcatgtacctgacccactaccggaccgagttcgtctcggtcgcggtgcagctcccgaccgtggtggcgtgccggtgctcgccgacgcagaaggccgaggtggcccggctcatccgggagcacaccaagaagcgggtgtgctgcatcggcgacggcggcaacgacgtgtccatgatccaggccgccgacgtcggcgtcggcatcgtcggcaaggagggccgccaggccagcctcgccgccgacttctccatcgagcagttcttccacctgaccaagctgctcgtctggcacggccgcaacagctacaagcgcagcgccaagctggcccagttcgtcatccaccgcggcctcatcatcgccgtgtgccagaccatgtacagcatcgctctgaactttgagcccgagggcctctacaaggattggctcatggtgggctacgcgacggtgtatacggccatgccggtcctctcgctggtgctcgacaaggacgtggacgagaacctggccaacctgtacccggagctgtacaaggagctgacgtcgggccggtcgctgtcgtaccgcaccttcttcgtctgggtgttcgtctcggtctaccagggctgcctcatccagggcctgtcgcagctgctgaccgaggtggacggcccccgcatggtggccgtcagctacacggccctggtgctcaacgagctgctgatggtggccatcgagatcacgacctggcactgggtcatggtcgcgtccatcgtggggactttcttgctctttgtcggctcggtcccgttcctgggccgctatttcgacctggcattcttgtcggctctgggcttctattggcgggtagctgccatcttggccatgtccctgattcccacgtacgcggccaaggtgatacagcggaccatgaagccgccctcgtaccggaaggttcaggggatttga

SEQ ID NO: 3599 - protein, 1336 aa, Myceliophthora thermophilia
MRSSTTHPPAKPPDSPADHSDTDLELDLEELDPQTVSGSDQPRGRGLLGQPRQLPEERAPRIALRTLRMGGLRRGARRNGYGELGRSHAGGAGGAEDAQGPLRDGYVGDRRYSDASAAGGDDAPLLSEPGRSSSNKRRGSFAGDRLRRVGLRLPSFMSGAPANQDNPDEELDKEEDDPSSSRLVAVGSSQSTRFPPNIISNAKYTAWSFLPVTLYNEFSFFFNMYFLLVALSQAIPALRIGYLSTYVAPLAFVLVITLGKEAYDDIERRRRDNEANSEEYTVLQFEEPGRAAVAGAGTGAGAGARLRTRKSTLTSARRGPKRNGADAGRLSDIQEEEEQTEGDGRRKPPGCVVSEVSKKSRDLRVGDVLKLSRGDRVPSDVIILKCLSNDPAAQKAEEGPVPQEEPLLLDHAAETARGGAATGTADEENPGAAEGGSNGETFIRTDQLDGETDWKLRLASPLSQNLATEEFVRLRVTGGKPDKKVNEFIGSLELLPSRQDAMSTATFSPTDDDEGVKAVSLSIDNTAWANTVIASHATTLAVIVYTGPQTRSALSTAPSRSKTGLLEYEINSLTKILCFLTLALSIILVALEGFSNTEGNVWYVKITRFLVLFSTIVPISLRVNLDMGKSVYSWFIQRDPGIPGAVVRTSTIPEDLGRIEYLLSDKTGTLTQNEMEMKKIHVGTVSYANDAMDEVSAYVRQGLHLPPPSADSRALVTPSTSLTSAANVGATRTRREIGSRVRDVVLALALCHNVTPTTEEDGAGRLVNSYQASSPDEIAIVRWTESVGLRLASRDRKSMVLESTEAGRPVVKVRILDIFPFTSEGKRMGIIVQFYERLEPGVPGPTSGEIWFYQKGADTVMGSIVAANDWLDEETANMAREGLRTLVVGRKRLSAAEYQEFSARYHEASLAISGREAGMQAVVSRYLERDLELLGVTGVEDKLQKDVKPSLELLRNAGIKIWMLTGDKVETARCVAVSSKLVARGQYIHTVAKLRRKDAARENLDLLRGKTDSCLLIDGESLGMYLTHYRTEFVSVAVQLPTVVACRCSPTQKAEVARLIREHTKKRVCCIGDGGNDVSMIQAADVGVGIVGKEGRQASLAADFSIEQFFHLTKLLVWHGRNSYKRSAKLAQFVIHRGLIIAVCQTMYSIALNFEPEGLYKDWLMVGYATVYTAMPVLSLVLDKDVDENLANLYPELYKELTSGRSLSYRTFFVWVFVSVYQGCLIQGLSQLLTEVDGPRMVAVSYTALVLNELLMVAIEITTWHWVMVASIVGTFLLFVGSVPFLGRYFDLAFLSALGFYWRVAAILAMSLIPTYAAKVIQRTMKPPSYRKVQGI

SEQ ID NO: 3600 - DNA, 2520 bp, Myceliophthora thermophilia
atgacctccctcaagcagttcattcgcaatgtgcgtgccgcaaagacgattgccgacgagagggctgttattcaaaaggagagcgcggccattcgggcgagcttcagggaagagagcgcagaccatggcgtgaggcgcaacaatgtggccaagctcctctacctttttaccctcggcgagcgaacacactttggccagatcgagtgcttgaagctcttggcctcgcctcgcttcgccgacaagcggctaggacatctcgcgacaagcttgctgctcgatgagaaccaagaggtcctgactttggtcaccaactctctgaaaaatgacctgtctcattcgaaccaatacgtcgtcggcctcgcgctctgtaccctaggtaacatcgcctcggtcgaaatgtcgagagacctgttcagcgagatcgagagcctcatatccacggcgaatccctacattcgacggaaagccgctctctgtgccatgcggatatgcagaaaggtcccggacttacaggagcacttcatcgagaaggcggcggcgctgctctcggaccgcaatcacggcgtgctgctttgcggtattaccctggtcaccagcctttgcgaagccgacgaggacgagggcggggagttgggcgtcgtcgacaagttcaagcaattcgtacctgtgctcgtgaggacgctgaagggcttggcctcctcgggctacgcgccggagcatgatgtcaccgggattaccgaccccttcttgcaggtcaagattctgcgtcttctcagggtgctggcccgcggggatgcccaggttacggagcagatcaacgacatcctggcgcaagttgcgaccaacacggattcgtccaagaacgtcggaaactcgatcctctacgaagctgtgcggaccattctagacatcgaggcagacgcggggcttcgggttcttggtgtcaacatcctcggcaagttcctgaccaacaaagacaacaacatccgctacgtcgccctgaacacgcttgtcaaggtggtggctattgacaccaatgccgtgcaacggcaccgcaacacaatactggagtgcctgagggacccggatatcagcatcaggaggagggctctggatctcagcttcacgctgatcaacgagagcaacgtcagggtgctgattcgcgagctgttggcgttcctggaggtggctgataacgagttcaagccgaccatgaccagccagatcggtattgccgctgaccgctatgcgcccaacaagcggtggcactttgacacgatgctccgcgtggtgactctagcgggcaactacgtcaaggaacctatcctctcatctttcgtccgcctcattgccaccacccccgaactacagacatatgcggtgcagaagttgtatgccaacctcaagaaggacatcacccaagagagcttgacacaagccggtgcctggtgcataggcgagtacggtgaagctctgctgcggggtggccggtatgaggaagaagagctagtgcaggaggtcaaagagcacgagattgtcgacctgttttcgacaattctcaacagcagctatgcctcgcaagtcactaccgagtacattatcacggcgctagtcaagcttacgacgcgactatcggatgcggcccagatcgagaggatacggcgcatcctgcagaatcaccagaccagtctggatgtcgaggttcagcaacgcgccgtggagtttggcaacctcttttcatacgaccagattcgccgaggcgtgttggagaagatgcctccgccgcagatcaaggaggagtcccgcgtgctgggcgaggcggctaagaagacaaacaaggcggcgaaccggaagtccagggtgatcaaaccaaaggaggaggatctcctcttcgacctaatgggcgagagcagcggccccgcgccgccgccggtcaacggcaccggcaatgccgacttgctcgcagacatcctcggtggaaccagctcaccgcctcccgctaccacatcgcctcccccaggtcagtcaaacgtggcgtccatcatggatctcttttcgcaaggccccgcctccacgccttccccagcgcagagtgccgccgcgcatgcccctcccagcgccgacctcttctcggcaactgcatcgccgcctccccaacccggccctgctgctgcggtcgccgcagcccccggatatccctgctatgacagtaacggcttggtcgtgaccatccagacacaaagaaacgccgagggcatgattcaggccactgcccggttccgaaactcgtctgccgcggggcagctgtcgaacgttggacttcaggcggccgtaccaaagtcgcagaagctgcagctgctgagcatctcatcctcagagcttgcggtcggagccgaggcgacgcagttgatgagggttgcgggatgcaaaggacctctgcgtcttcgtttgaggatagggtattcccaccctacggcaggacaggtcatggacgttgtcaactggacggagccgtcgtaa

SEQ ID NO: 3601 - protein, 839 aa, Myceliophthora thermophilia
MTSLKQFIRNVRAAKTIADERAVIQKESAAIRASFREESADHGVRRNNVAKLLYLFTLGERTHFGQIECLKLLASPRFADKRLGHLATSLLLDENQEVLTLVTNSLKNDLSHSNQYVVGLALCTLGNIASVEMSRDLFSEIESLISTANPYIRRKAALCAMRICRKVPDLQEHFIEKAAALLSDRNHGVLLCGITLVTSLCEADEDEGGELGVVDKFKQFVPVLVRTLKGLASSGYAPEHDVTGITDPFLQVKILRLLRVLARGDAQVTEQINDILAQVATNTDSSKNVGNSILYEAVRTILDIEADAGLRVLGVNILGKFLTNKDNNIRYVALNTLVKVVAIDTNAVQRHRNTILECLRDPDISIRRRALDLSFTLINESNVRVLIRELLAFLEVADNEFKPTMTSQIGIAADRYAPNKRWHFDTMLRVVTLAGNYVKEPILSSFVRLIATTPELQTYAVQKLYANLKKDITQESLTQAGAWCIGEYGEALLRGGRYEEEELVQEVKEHEIVDLFSTILNSSYASQVTTEYIITALVKLTTRLSDAAQIERIRRILQNHQTSLDVEVQQRAVEFGNLFSYDQIRRGVLEKMPPPQIKEESRVLGEAAKKTNKAANRKSRVIKPKEEDLLFDLMGESSGPAPPPVNGTGNADLLADILGGTSSPPPATTSPPPGQSNVASIMDLFSQGPASTPSPAQSAAAHAPPSADLFSATASPPPQPGPAAAVAAAPGYPCYDSNGLVVTIQTQRNAEGMIQATARFRNSSAAGQLSNVGLQAAVPKSQKLQLLSISSSELAVGAEATQLMRVAGCKGPLRLRLRIGYSHPTAGQVMDVVNWTEPS

SEQ ID NO: 3602 - DNA, 1266 bp, Myceliophthora thermophilia
atgtggcgagaccgcacgaacctctatatctcgtaccggcagtcctacgcccaccacccaactcagcgcaaccggtatggaccatctagcgcgggcgaccgcttcggcggcagcggcgcgagcacgtgggtcctattttcggcagacgatgaccggcgaggactcttatcctcaggcgcctacgatgtggatgacggcgatgcagtcatcgagatggatcggctccctccccgctgggccgacgtgtcggacgaggtgacagagttacttgcggacatcgcgagcaaaagccagaagctggagaggctgcatcaaaagcacgtcctccccgggttcaacgacgaagaagccaagaaggctgaggagggcgagattgagcggctgacgcaggacatcacgcgtggcttccacgaatgcaacagatgcattcagcggattgggcagatggtgcgcgaaggcaaggcaagtggccagatgacccgcgccgaagagaccatggcgaagaacatcaaggtcaacctagcgaccagggttcaggaggcgagcgctggatttcgcaagaagcagagcgcataccttaagaaactcaggagtatggcaggattggcaaaacccattgaacgttctaccaccccactggctgggggtagctatgccgacccgtcaattctcgaatccgacgcagacagaagctattcgcagtcagcactccaggcaccggctcaccaacaactgcttcattcgaatgacgccgtcatatcgcagcgcgagagacagatcgaggagattgcgcagggcatcattgaactctccgatctttttcgcgagttgcagaccatggttattgaccagggcactatgctagaccgaattgactataatgtggagcgtatggccagcgatgtgaaggaagccgagaaagagattaaaaccgcggaggggtaccagaagaagacgactaagaggaagatcattttcctcctgctgctgataattgccgcgatgattatattgctggttatcaaaccgaagaaacacggggccacagcggtcgaggacagtctcatcaacgcccccaacaaggtgcatgagcagcagaagttctaccagcaagcgtacaaggcgcatacgcgcatttggaggattaaccctcgcagcagcttgtttctgacgccctacaacatcctcctctggggaaccactgccgccaccctctacgccatgggccgcaggattttcggcaagaacacctggttcagcgactaa

SEQ ID NO: 3603 - protein, 421 aa, Myceliophthora thermophilia
MWRDRTNLYISYRQSYAHHPTQRNRYGPSSAGDRFGGSGASTWVLFSADDDRRGLLSSGAYDVDDGDAVIEMDRLPPRWADVSDEVTELLADIASKSQKLERLHQKHVLPGFNDEEAKKAEEGEIERLTQDITRGFHECNRCIQRIGQMVREGKASGQMTRAEETMAKNIKVNLATRVQEASAGFRKKQSAYLKKLRSMAGLAKPIERSTTPLAGGSYADPSILESDADRSYSQSALQAPAHQQLLHSNDAVISQRERQIEEIAQGIIELSDLFRELQTMVIDQGTMLDRIDYNVERMASDVKEAEKEIKTAEGYQKKTTKRKIIFLLLLIIAAMIILLVIKPKKHGATAVEDSLINAPNKVHEQQKFYQQAYKAHTRIWRINPRSSLFLTPYNILLWGTTAATLYAMGRRIFGKNTWFSD

SEQ ID NO: 3604 - DNA, 1770 bp, Myceliophthora thermophilia
atggcgacccgcaaggtccgatacaagaaactgagcgtgaaaacgcccctggccgtgctcagagaggaccaaatcgacccggccgagtacgagtcactcacaaatgaagcccaaatcgcgacaggagtcgagcaagccgaggaaaatgaataccatctccaggctgtcctcaagagcgaaggggtcgccgccgataaggagattcccgtaccgcctcctcaggagagtactttgaactatgatgagctctatactcgccccttctccaagacgtcatcatacatccgcttctcccagactgtggaggaatccataggatgtacgtatgatatgacggaggaggatgatgaattcctgaagtcatacaaccagaagcgaccaccttcggctcagctctctgaagatgactttgagaggatcatggaggtgtatgaggacacctcctatatcaaggctcccttcgcttcgatagaccagaccatagttccgtacgaggagatgctccagggcttgcaagatcttgacaaggcaaagatcatgcctcacgccaaggagatctatgagtattggaaatcccggcggctagcgctgaacaatcagccccttcacccgacgctcaagtttgagaggcatcaggaaagcgatgacaccgatccgtatgtctgcttccggcgtcgtgaggtccgtcagacgcggaaaacgcgagctcgggacgttcagagtgcggataagctcaagcgcttgcggaaggaacttgaggagggccggcaattggtcttggccgcgcacaaccgcgagcttctcaaagccgagatgctcaaggcagatcgcgccgtttttgaggtccgagcccgactcaaggagctcaaagtccggttgggcatcaagaccgacgacgaggacctcatcaaccagaagccgcaaaagaggaaggcccccgaagcccctgcagtgcaacggccaccgccgccaacacagctccgtatcgctgccagggcggatggccgatctgccgagggcgatctctcgctccttgctgatcgcttggctgaaaaggagaatgagctccgtgccgatatcgagaagaaggtgcagagtcataatgaatggaatcgcaaccatctcgacctcacacgaggcccgctctcgccggtccatgggccaagacaggccccaagctttaggccagctaagacgcagtatctgatgacgccaccagcgtctgcgtcgtctgattcactggaggatcccacacccatgtctctggataagccacagaatcccccggcgccgtataatttccgtggcatagcccgggatgaggagtcgaggaaaaaccctccggcgtatcgccgtcggatcggccggctcaaccggctatggatcgaccgtcgcgggatggccagtccgccgcgcgatgtcagtgaggaggtgctggaccggtggaagtacgatcagtcgtcggatgacgaggaatatccgccaacctatgaggttgatccttttgacatcaatgcgctcagattccgcgcttcaatccctctccctccgtggatgatggctagggcggcggtcccgagcacccgaataccattgccaccacctcaacaaccacacccgccgcaacagctgcagcaagcacagcaagtgcagcaagcgcagccgcaagtgcagcaaccacccccacagccacaaccagccgtatcgcagccgcagccgcagccgcagccgcagccacaaccaccggctcaagcccagagtacgtcataa

SEQ ID NO: 3605 - protein, 589 aa, Myceliophthora thermophilia
MATRKVRYKKLSVKTPLAVLREDQIDPAEYESLTNEAQIATGVEQAEENEYHLQAVLKSEGVAADKEIPVPPPQESTLNYDELYTRPFSKTSSYIRFSQTVEESIGCTYDMTEEDDEFLKSYNQKRPPSAQLSEDDFERIMEVYEDTSYIKAPFASIDQTIVPYEEMLQGLQDLDKAKIMPHAKEIYEYWKSRRLALNNQPLHPTLKFERHQESDDTDPYVCFRRREVRQTRKTRARDVQSADKLKRLRKELEEGRQLVLAAHNRELLKAEMLKADRAVFEVRARLKELKVRLGIKTDDEDLINQKPQKRKAPEAPAVQRPPPPTQLRIAARADGRSAEGDLSLLADRLAEKENELRADIEKKVQSHNEWNRNHLDLTRGPLSPVHGPRQAPSFRPAKTQYLMTPPASASSDSLEDPTPMSLDKPQNPPAPYNFRGIARDEESRKNPPAYRRRIGRLNRLWIDRRGMASPPRDVSEEVLDRWKYDQSSDDEEYPPTYEVDPFDINALRFRASIPLPPWMMARAAVPSTRIPLPPPQQPHPPQQLQQAQQVQQAQPQVQQPPPQPQPAVSQPQPQPQPQPQPPAQAQSTS

SEQ ID NO: 3606 - DNA, 1161 bp, Myceliophthora thermophilia
atggacgacaacagaggccagaggaggcagattgaaccgcccatctactccgcttctggtggctcacggcatcacccatcgctgcacgagcagccacagcagcaaaggcggcccttcccgggcgctcagggggagaggtttaggccagcgcccatcaacacatcaccatcgggtgcggcgcgggggataggcggttcaactgggtacagcgggtactatcaggatgcgtcgggtacaagctttccggcgacggcgatgccccaaggagcgatgggttaccatcactccaacgccgaatacgggcagccggactcgcggcagacccagagcttcggcggcacgtaccccccggcaatgatgtaccacgtacagcaaacgggagggccacagagcgccgccgtgtacgatgcgagtcaacagttttcatcccggcagcctgcaggcttgccgatgatggcgaccgatgtcgcgggtccttacttctcaagcgagccaaccaccgcggctgccacgtccaacctgcagggccagtcgggctcttccagtgcacctcaagtatatcagcagtcgggaatgcacggctattcgaccggaggcatgggcgccatcggagggatggctgcgcaaacgactcccgccactgacgtgagaatggaggaagagtaccccgctggcaccggcctcgacgacgcttacctcagctaccaaacggcgctcaaggaaatcttccaaaacattcggaacggcgtgcttgcgactgccagcgagtcgctccttaacatatccgattggctgctttcgcatgttgtggagttgggcctcacttccgacgatcagagtctgcatagcgggcggatcaaattgtggaacgatttcaatcacgcctggctggccatgtttcagcgacagaaagagatgatggaatccgggcagcaaatacagcgcccacagagcctcatctcacgagaaggactccagaagatgggcaaggatctggtcaggctctgtgacagcgtggaaaggcacggcctggttgattaccagtacggggtatgggaagaacagattatcgacatacttgaggagtgtttggacctctacgaggcttctaacgcaccgggcggccccagcgaggggagcccctccaatcgtcgtcgctga

SEQ ID NO: 3607 - protein, 386 aa, Myceliophthora thermophilia
MDDNRGQRRQIEPPIYSASGGSRHHPSLHEQPQQQRRPFPGAQGERFRPAPINTSPSGAARGIGGSTGYSGYYQDASGTSFPATAMPQGAMGYHHSNAEYGQPDSRQTQSFGGTYPPAMMYHVQQTGGPQSAAVYDASQQFSSRQPAGLPMMATDVAGPYFSSEPTTAAATSNLQGQSGSSSAPQVYQQSGMHGYSTGGMGAIGGMAAQTTPATDVRMEEEYPAGTGLDDAYLSYQTALKEIFQNIRNGVLATASESLLNISDWLLSHVVELGLTSDDQSLHSGRIKLWNDFNHAWLAMFQRQKEMMESGQQIQRPQSLISREGLQKMGKDLVRLCDSVERHGLVDYQYGVWEEQIIDILEECLDLYEASNAPGGPSEGSPSNRRR

SEQ ID NO: 3608 - DNA, 261 bp, Myceliophthora thermophilia
atgagggacggcttgagagttctcgatccaaccaagcacactcaacttgaacaaccgaggagcgtgacggtattgagtacgccctgttgtttcattcggcggccgacgggccaacttcaaagccgagggaaccacgctgctgtcagcgccctccggcaaatcggccggagctcggaaccctttgaagaagggccgtcgctgatcggtgggaagttccttgtctactcgtctactccgtactgcgaggcaactgcttcgtaa

SEQ ID NO: 3609 - protein, 86 aa, Myceliophthora thermophilia
MRDGLRVLDPTKHTQLEQPRSVTVLSTPCCFIRRPTGQLQSRGNHAAVSALRQIGRSSEPFEEGPSLIGGKFLVYSSTPYCEATAS

SEQ ID NO: 3610 - DNA, 1020 bp, Myceliophthora thermophilia
atgagtggtggttggaacaccatcgaatccgatgcaggcgtcttcacgtacctgttggataacctcggcgtaaaagacgtccagttcgaggagctcctctcgctcgacccggacgcgctcgcccagctgtaccccgtctacggcgtcatcttcctcttcaagttccccaccgacgcaccctaccgcgccggcgacaaacccctcgacggcaccttcgaccaagatgccgccgagcgcctcttcttcgcggcgcagaccatccagaacgcctgcggcacgcaggccctgctcagcgtgctcctcaacaagaccccggacaacacggcctccccgagcggcagcgacgacgacgacgacgagaccatcgacatcggcccggagctgacctccttccgcgagttcaccatggccctgccgcccgagtaccgcggcgaggccctctcgaacagcgagctgatccgcgacgtgcacaacagcttcgcgcggtcgtcaccctttgtcgacgaaacccagcgcgggcccgacgaggccggcgaggacgccttccacttcatcgcctacaccccgatcggcggaaccctgtacgagctcgacggcctgcagcccgcgcccatcagccacggcccctgcacgcgagacgagttcccgcgcaaggtcatggacgtcctgcagcggcgcatcgcccgctacgacgcgaccgagatccggttcaacctgctcgccatggtgcgcgacctgcggatccgcgcccgcgagatcggcgattttgagctgctggccagggaggagcggaagcggagggactggcagttcgagaacgccctgcggcggcacaactttgtcggcttcgccggggaagtgctcaagggggttgtcgcggccaagctcaaggaaggggacggggcgtacgagaggtgggtggaccagggcaggcagaagatgcagaggaggatagaggaacgcaagaagagcggtgctggcggcgggggctcaggagaggatgtggagatggctgggtag

SEQ ID NO: 3611 - protein, 339 aa, Myceliophthora thermophilia
MSGGWNTIESDAGVFTYLLDNLGVKDVQFEELLSLDPDALAQLYPVYGVIFLFKFPTDAPYRAGDKPLDGTFDQDAAERLFFAAQTIQNACGTQALLSVLLNKTPDNTASPSGSDDDDDETIDIGPELTSFREFTMALPPEYRGEALSNSELIRDVHNSFARSSPFVDETQRGPDEAGEDAFHFIAYTPIGGTLYELDGLQPAPISHGPCTRDEFPRKVMDVLQRRIARYDATEIRFNLLAMVRDLRIRAREIGDFELLAREERKRRDWQFENALRRHNFVGFAGEVLKGVVAAKLKEGDGAYERWVDQGRQKMQRRIEERKKSGAGGGGSGEDVEMAG

SEQ ID NO: 3612 - DNA, 453 bp, Myceliophthora thermophilia
atgattggaaaacataggtttgccgagagtaagaagaaaatccaggttcgctcttcgctcgccgggcgattcgaaaacctggcttggaatttcgggccagttctgtctgattcccagaggactgcggtttcagacgtggtcgaaccattggacatcttcggtctaagcgtccacgccgcacctgctcaaaacgtgtgcggcaaagctcgttggttggtcgacgccttagctgccccgcttttcctaaagcacgtgacaaatggctcgatgccaagtgattccacttttgcctctgggaccgcccaatttccatttcgctcagattcaccagaaaacggttttgtcagccccaaccataaagccccggaatccgtcgccaccaccaacatcctgcagattgcggctctacatccatcaacctgcgaccgaataaacgcaattgaaaacgcttaa

SEQ ID NO: 3613 - protein, 150 aa, Myceliophthora thermophilia
MIGKHRFAESKKKIQVRSSLAGRFENLAWNFGPVLSDSQRTAVSDVVEPLDIFGLSVHAAPAQNVCGKARWLVDALAAPLFLKHVTNGSMPSDSTFASGTAQFPFRSDSPENGFVSPNHKAPESVATTNILQIAALHPSTCDRINAIENA

SEQ ID NO: 3614 - DNA, 336 bp, Myceliophthora thermophilia
atggctgtcgcgtgcaaaacgcacgcgttgcacggggacaaggacggaaggccgcatccatcccaaccaagccagagggccacgcccctcgccggaccgaattcgacgtgttaccgcgccaggccaggcctgggagaggcaagccactggacagttcaatgtccgctgacgagccgcagcagccaacgccgcacgccttgtgtggtgctgtgcgacgcgccagtaactaatcctcgggcccgtatgatatacttgacatgttatatgggttataccgtagctatagtgtcttcccagacgccgctctgcatctattgcgtagtcgaagtggtgtag

SEQ ID NO: 3615 - protein, 111 aa, Myceliophthora thermophilia
MAVACKTHALHGDKDGRPHPSQPSQRATPLAGPNSTCYRARPGLGEASHWTVQCPLTSRSSQRRTPCVVLCDAPVTNPRARMIYLTCYMGYTVAIVSSQTPLCIYCVVEVV

SEQ ID NO: 3616 - DNA, 1920 bp, Myceliophthora thermophilia
atggccggtcccggtggtggtcctcctcgtcggagccacaccaagtcccggaagggatgcgacacctgcaagcgtcgccatattcggtgcgatgagaacttcccgcagtgccgcaactgcaccaagcacaagatccgctgtccttacaatgacgttcccgttccagaggacagggctgggtctcctgacaagcccgacctcatgtggacgccggagattgaggctaccatcgaccagtggcggcgcactggcatgtttccgtttcccagcctgggtatctaccctgcgcctgcacctgagtatctcaccctggaggagttgaggttgatccaccacgtcgcgtcgatcagccatcagatgcaggaactggacgccaacgacttcacgctctggacgcggcagatcccgacgatcatcaggatcggtgcgacccaccgctatgtcttgcacgctctactggccttctctgccatgcatctggcctacctgacgggctgcccggccgttggcaacatggcctatgagcatcgcggtgccgccttgaaggggctgcaggaggccatcagcactttctctcgggagacctcggacgcgatcctcgccgcatcactggtcctttcgtggcaagccacagattggcggagctggacccagcttatgcaaggaacctcatcggtcatcgaagccatggatccttggaagcacgagtcgcagtttggtgacttcatcgccgagagcagcactttcccaaccgccccgccctcgcccactccggatcatcagcccagccagcctcgtgaggaggatctggaggctttccagcgggtcttgcagcagctgcagaagctcgagagcttcctcaagaagaatcgcgaggacacgaagccggttgcccagctcatcaccttcatgaagggctcccgcaaggtcacctcgtccctgtcggtggcgcagcagtttgatcgtctgaagcccttgcggacctggttgttctggctgcctgtcatgtacctgcaacggaatggtgcatcgccaagcgccctggtcgtcattgcccactactacacggccgccttgctgatggaacgtctctttcccgagattggcgccgcctactttggaagcatgaccattggtccggtcgaggaaatcgcccgccgtctctacgcgatccgcaactccggtcatctcgagggtgacctccagactcctctcaacctgatggagttccccattgagacggtcaacgagttccgctcccggatgggctgggttcagccagtgcgcacgccctcgttccctcagttcgatcagccgaacttctacatgaacgagggctcgcccttgatgttgtcggccaacttgtcttccgagtaccttccgtatggagacaacgtggccttcagctacagcaccgaggacctgtcggtcattcccgagtctggcgccaccaacgccatcaacccggcccagctgtcgtcgccgtacgtcaatcccaactacctcaacatccccagtccgtcgtatgggggatacagtccagcctcgagtacgtatggcgactttggcgacgcgtctccggtggtctacagcgacgccgaagacaacggggcctacggcgtcgggtacgcggcaacctcaccaatgctgggcggtgccaacacttatggcgtcgggccttcccatctgagcaccagcccggattatcccccaccagaggacctgttgtggctgccgcctcaccaccgatcccttgtcccttcgccctttctgagtcctgagcaacccccgctcccagttcccgagtctcccgcctctcaccctgctcctctggccggcgaggagactgcctttcctgtcaacgtcgtgtccaccctgccttcaacagcgccggaccaaggaaagggcaaggccgtgtag

SEQ ID NO: 3617 - protein, 639 aa, Myceliophthora thermophilia
MAGPGGGPPRRSHTKSRKGCDTCKRRHIRCDENFPQCRNCTKHKIRCPYNDVPVPEDRAGSPDKPDLMWTPEIEATIDQWRRTGMFPFPSLGIYPAPAPEYLTLEELRLIHHVASISHQMQELDANDFTLWTRQIPTIIRIGATHRYVLHALLAFSAMHLAYLTGCPAVGNMAYEHRGAALKGLQEAISTFSRETSDAILAASLVLSWQATDWRSWTQLMQGTSSVIEAMDPWKHESQFGDFIAESSTFPTAPPSPTPDHQPSQPREEDLEAFQRVLQQLQKLESFLKKNREDTKPVAQLITFMKGSRKVTSSLSVAQQFDRLKPLRTWLFWLPVMYLQRNGASPSALVVIAHYYTAALLMERLFPEIGAAYFGSMTIGPVEEIARRLYAIRNSGHLEGDLQTPLNLMEFPIETVNEFRSRMGWVQPVRTPSFPQFDQPNFYMNEGSPLMLSANLSSEYLPYGDNVAFSYSTEDLSVIPESGATNAINPAQLSSPYVNPNYLNIPSPSYGGYSPASSTYGDFGDASPVVYSDAEDNGAYGVGYAATSPMLGGANTYGVGPSHLSTSPDYPPPEDLLWLPPHHRSLVPSPFLSPEQPPLPVPESPASHPAPLAGEETAFPVNVVSTLPSTAPDQGKGKAV

SEQ ID NO: 3618 - DNA, 756 bp, Myceliophthora thermophilia
atggacgactcaacgccacctcccggccccaatggcggagggccgattgacattcaccaacccttcacccctggcgagcgcatccaacagctcagcgagaccgaccaggacatcgcctcccttctggtccatctctcagccgccatgcgtgccctggccacccctccggggaccaccgtttccgaaaccggcaacaacaacaacagcagcaacaacaattccagcacgattgcgaccggcgatccagacctcgaatcctcggaacccgccccggccaccggcaacgatccggtgtctgccttcaacgcagctcaggcagccttcttcaacaccctcgaccgcgttgacaagcacctgacccgccagatcctcgcactcgaagaggcgggcatcattacgcttaagaataccgcagccggatccgggacggcggcgggtacagcggcggcagaggggaccccgcagggcggcgagggggcggcggggggcccgagtggcacacaacagcaacaaccgcagcaacagtcgccggagggaggggcaggtgacgcggccaaggcaagggttgccgggccgaggaggctggagcccgacgggatgggcaggtatgggaatctggatgtgggcaagctgaacatggcgagcagcacggtagagagggatatggagcgggagctgtggcggagagcgagggaagagctcgccaaggtcgtcggtgatgccgggggcgggggtggagacccgatggagacgtga

SEQ ID NO: 3619 - protein, 251 aa, Myceliophthora thermophilia
MDDSTPPPGPNGGGPIDIHQPFTPGERIQQLSETDQDIASLLVHLSAAMRALATPPGTTVSETGNNNNSSNNNSSTIATGDPDLESSEPAPATGNDPVSAFNAAQAAFFNTLDRVDKHLTRQILALEEAGIITLKNTAAGSGTAAGTAAAEGTPQGGEGAAGGPSGTQQQQPQQQSPEGGAGDAAKARVAGPRRLEPDGMGRYGNLDVGKLNMASSTVERDMERELWRRAREELAKVVGDAGGGGGDPMET

SEQ ID NO: 3620 - DNA, 771 bp, Myceliophthora thermophilia
atggcattttcaggttcgtacggaataattgccttgccgctcaaacagtatgctgtcaaatcttcttctcttccaggccgcgaagccgagatgcggtgtaaaacggtggttaaaaacgagcagaggctcttctccagagatcggcggctcctacgagtggagctcgagatgaaacgttctgctgccttaatatcccaaagtgactgccgaaatggtctccgctggcaaacttacttgtgctacactgcctatcacgtcgcatggaccaggtgtcacgttctcctttacactacgagcatctcgcatttccgtggaaaactaaagaaatgggtgctggctgtctcggcacttctcggtggtttgatgtgcataacggtacgcgcaattttcgcaactggtagtggacggagtatgtttgcacatgcgtacgcacggtacggagtacagtcggaggtgacgggacttccagaagccagtggtttcagtacggagtacggagttagttgcgagctgaatggaagcgggcatttgcgcggaattatggggccctgtttcaccggccactccaaccatcggagcctcgctgaaaaacaccctccacgagagcccggaatgtcccctcaaaaagaggagcgcaatgcgtggtgctctaggaccgcgatcaatcgaaccagccagctcttatccgtatatagtgtgtacatagtagttcgatgccagtgctaccctccgatctccgcgcacatcgccctcgtgcacggacccaaataa

SEQ ID NO: 3621 - protein, 256 aa, Myceliophthora thermophilia
MAFSGSYGIIALPLKQYAVKSSSLPGREAEMRCKTVVKNEQRLFSRDRRLLRVELEMKRSAALISQSDCRNGLRWQTYLCYTAYHVAWTRCHVLLYTTSISHFRGKLKKWVLAVSALLGGLMCITVRAIFATGSGRSMFAHAYARYGVQSEVTGLPEASGFSTEYGVSCELNGSGHLRGIMGPCFTGHSNHRSLAEKHPPREPGMSPQKEERNAWCSRTAINRTSQLLSVYSVYIVVRCQCYPPISAHIALVHGPK

SEQ ID NO: 3622 - DNA, 372 bp, Myceliophthora thermophilia
atgcagttcaccgaagcccgtgatagccaaggtaattggactttgaccccctctaactactcgggaagggcggtcccgatcgtacgagagggcccttctatcttcaccgagattcagcaaaagccatcgacttacgcacatgtatggagtacacccgtgctctggactggccacgggcggcggaggcagccgaggcttacagtagagaacgctatacctccatactttgtattagatgatcttcaagcagtccgagacagacgggccaacgtctggaggtccggaaacgggacggtgacaccagacttgccgctcgggccggtctcgaacatcgggcttggcgcgcagaaaaccaaccccctctccttgtaa

SEQ ID NO: 3623 - protein, 123 aa, Myceliophthora thermophilia
MQFTEARDSQGNWTLTPSNYSGRAVPIVREGPSIFTEIQQKPSTYAHVWSTPVLWTGHGRRRQPRLTVENAIPPYFVLDDLQAVRDRRANVWRSGNGTVTPDLPLGPVSNIGLGAQKTNPLSL

SEQ ID NO: 3624 - DNA, 1233 bp, Myceliophthora thermophilia
atggccagcagcaacattaccagcgtcatcaacgaagagatcagacagcgtaaaggtgagatctcgaccatcaacaggcaaatccatgccaaccccgagctggcgtacgaggaacacaaagcccacgatgtcttcgtcaagaccttggagtccctgaactttcaggtgactccccatgcctacggcctcgcaaccgccttctcggcggagtacggctccggcggccgcctcgtcatctataacgccgagtacgacgccctcccgggcatcggccacgcgtgcgggcacaatctgattgcctcagcctcctttgccgcctttctcggggccgccgcggctctcaaagcctccgggcggccgggtcgcgtccggctgctcggcactcccgccgaggaaggcggcggcggcaagctcaagctgatcgaggcgggcgcatacaagggcgcgtccgcctgtctgatggtgcatccggggcccgggcacaacatgccagcccctctccgcggcgtcgccttcgcgcccatgctggccaacgtcaagatgcgtgtgcacttcgcgggccgcgaggcgcacgcctccatcgcgccctgggacggcgtcaacgcgctcgacgccgtgtgcctgtcctacaacgccatcagcatgctgcgccagcagatccggccctacgagcgcatccacggcgtgttccgctccgccggcgacaggcccaacgtcacgccggccgactgcaccgtggagtactactgcaggagcgcgaccaagtgcggggccgaggtgctgtggcagcgggtgcagaagtgcttcgagggcgccgcgatcgcgacgggctgcgagatgcggctcgaaccgataaactcgtacgctgacctgcgtttcagccgggccttgtgcgaagcctatgtcggagcgatgcctgaggggacggtgtcgctcggtacgccggcggatatccttgcggggagcacggatatgggcaacgtgtgctacgagtgtcccgggttccatggcgtgttcggcattggaaccaaagagggccaggcaaaccatacaaaggggttcactgcggcctctgggacggaggacgcgtttgagcgagctctggagtgcggaaggggcatggctgaggtaggatggaaggttctgagcgatgacgcatttgcggaaagggtggaaaaagaatggaaggaggatatgaagcaggctgcggagggtaaggcagcttccatatga

SEQ ID NO: 3625 - protein, 410 aa, Myceliophthora thermophilia
MASSNITSVINEEIRQRKGEISTINRQIHANPELAYEEHKAHDVFVKTLESLNFQVTPHAYGLATAFSAEYGSGGRLVIYNAEYDALPGIGHACGHNLIASASFAAFLGAAAALKASGRPGRVRLLGTPAEEGGGGKLKLIEAGAYKGASACLMVHPGPGHNMPAPLRGVAFAPMLANVKMRVHFAGREAHASIAPWDGVNALDAVCLSYNAISMLRQQIRPYERIHGVFRSAGDRPNVTPADCTVEYYCRSATKCGAEVLWQRVQKCFEGAAIATGCEMRLEPINSYADLRFSRALCEAYVGAMPEGTVSLGTPADILAGSTDMGNVCYECPGFHGVFGIGTKEGQANHTKGFTAASGTEDAFERALECGRGMAEVGWKVLSDDAFAERVEKEWKEDMKQAAEGKAASI

SEQ ID NO: 3626 - DNA, 450 bp, Myceliophthora thermophilia
atgtgcggccccgaaacaccttcagccaccccgcgcgtcggcgcccgcgtcgacctctcctccccaaccggccgcggcagcctcggcaacctgctcttcctcaatccctcatccccttccagcacacacgccacacacgtccgctttcaccaacgcaaagaggagccctctcccctgggtgaccggggtgattgcgacgacgtgctcgtatccatacacatgaccggcgacctgacaaaaccgctcgccgagtcgggcctgatgcggcagttcaccctgcgcgggcacagcgagggggccgagatgccgctgggcgcggccgtgtcgctgcaagtggggcaagacggcatcatcgggaggagggtgtcggtgcggagaggccacgagctgctggcggacggcatcgtggggttcaactttgtcccagtaatggctccttccggcgtttga

SEQ ID NO: 3627 - protein, 149 aa, Myceliophthora thermophilia
MCGPETPSATPRVGARVDLSSPTGRGSLGNLLFLNPSSPSSTHATHVRFHQRKEEPSPLGDRGDCDDVLVSIHMTGDLTKPLAESGLMRQFTLRGHSEGAEMPLGAAVSLQVGQDGIIGRRVSVRRGHELLADGIVGFNFVPVMAPSGV

SEQ ID NO: 3628 - DNA, 660 bp, Myceliophthora thermophilia
atggcagcggtagcttacagccctgacgcctacaactcacttccaagtcttcgggccgcaagcggtcagttgaaggagttggatggcgaatccgtcgtttctggtccgatccggcaacttttcgtgagccacggcgtccataagcggttcggcgtcgtcttgctgcacaagcacttggacatcgggccaaccgagcgtctggttgagtacgggcacacctcaatcccgtgggaagtcggcgacactactagctacgtcatcgacaaatatgaaggcacaatcttcccacggtcgttccggctgatggaaggaaactttgtcccttacgaatttgggtactttcacgaaagaccgcacccggtgtttttgggggaaagggatagccagttcctcaaggagttcggtagttttctggcagaacatcagcttgatggggtccttggcctccgtgacttggaccaacgtgattcgaagctgaacgtcgaggtgactgaaggcaaggccaatatcatgatgccgcgaggcagtgttccggagagcgagctcattccggcggtttggatcttcggacttgacgacgacgataggtgccattgccgtgagtactgctatagagactcaaagggtaaccacaccggcagcgatcatggctgcggttag

SEQ ID NO: 3629 - protein, 219 aa, Myceliophthora thermophilia
MAAVAYSPDAYNSLPSLRAASGQLKELDGESVVSGPIRQLFVSHGVHKRFGVVLLHKHLDIGPTERLVEYGHTSIPWEVGDTTSYVIDKYEGTIFPRSFRLMEGNFVPYEFGYFHERPHPVFLGERDSQFLKEFGSFLAEHQLDGVLGLRDLDQRDSKLNVEVTEGKANIMMPRGSVPESELIPAVWIFGLDDDDRCHCREYCYRDSKGNHTGSDHGCG

SEQ ID NO: 3630 - DNA, 609 bp, Myceliophthora thermophilia
atgtcttcgttcgagtctgtggtcgtgatcgatggcaagggccacctgcttggccgcctggccagcatcgtcgccaagcagctcctgagcggccagaagattgtcgtcgtccgctgcgaggctctgaacatctccggcgagttcttccgcgcgaagctcaagtaccacgcctacctccgcaaggcgacccggttcaaccccacccgcggcggtcccttccacttccgcgctccctctcgcatcttctacaaggccgtccgtggcatgatcccccacaagaccgcccgcggtgccgccgcccttgagcgcctcaaggtcttcgagggtgtcccgcccccgtacgacaagaagaagaagatggttgttcctcaggccctccgtgtcctgcgcctgcagcccggtcgcaagtactgcactgtcggccgtctcagccacgaggtcggctggaagtaccaggatgttgtcgagaggctcgaggagaggcgcaaggccaagggtgccgcctactacgagcgcaagaagctggccgcgaggcagctgtccgaggcgaagaagacggcgaaggtcgaccccaagacggcggaggctctccaggcctatggctactag

SEQ ID NO: 3631 - protein, 202 aa, Myceliophthora thermophilia
MSSFESVVVIDGKGHLLGRLASIVAKQLLSGQKIVVVRCEALNISGEFFRAKLKYHAYLRKATRFNPTRGGPFHFRAPSRIFYKAVRGMIPHKTARGAAALERLKVFEGVPPPYDKKKKMVVPQALRVLRLQPGRKYCTVGRLSHEVGWKYQDVVERLEERRKAKGAAYYERKKLAARQLSEAKKTAKVDPKTAEALQAYGY

SEQ ID NO: 3632 - DNA, 1200 bp, Myceliophthora thermophilia
atgttccgaccgcctgcgttgcgccgattcgccggcactcccgcgcccatcaggccattgcaagttgtggttccccgccggagtatcttctcccgcagaaacgacaggaggcggtcgagccgggccgtcgaaaacctcgacatccagcggctggcgaaagaagcggaggaatggcaccgtcagcggcgcatcttcctctggtcgggagccatcgccggcgtcctctccaccatctacacggcctacaagctcaagctcgcgatcgagcgggaacataagcttgatgccgacctcccctcgacggaccctctcgccggtgccaacgcggcagaccgcaaaatagtgattcacgacgaggagggccgtgagatggtcccaaccggcaacagcacggtcccgatgttcccgcgcacgctcgacctcccagccttcacgaccccaataacctcaccctcgccagacgctaccgccacgccaaccatcactaccccttccggcacgaccgaatacaccctcgtcggcctcggcctgcggacggtaaccttcgtcggcctgcaagtctacgtcgtcggctactacgtcgcgacggccgacatcgcggcccttcagaacgccctcaccaagcggatcaacccgatcgccaccacgctcgtgccgggcgagcgcgagcagctccgtgccgcgctgctggacccggccgagggcgagcggacctgggacgagctgttggccgcgggcgtgccggcgcggtcggccttccgcatcgtgcccgtgcgcgacaccgacttccaccacctgcgcgacgggttcgtgcgcgccgtccaggcgcgggccgggccccagaccatggccgacgagtcgtttggcgaggcgatgcgccagttccgcgccgtcttcaaccgcggcagcgcccccaagcgaaaggagctcctcctcgtccgcgacgagacggggaggctgagcatcgcctacgacggcggcgcgaacaagaaggaaggccggccggccgggcggcagctgattggggtcgtcgaggatgagcggctgtcgagggcgctgtggctgaactacctggcgggcaagaaggttgccagcgagccggccaggcaaaacatcgtggaagggatcatggggttcgtcgagcggccagtcggcactgtcgcgtcgcaggttgtgcctgtcttgaacccgaaagtataa

SEQ ID NO: 3633 - protein, 399 aa, Myceliophthora thermophilia
MFRPPALRRFAGTPAPIRPLQVVVPRRSIFSRRNDRRRSSRAVENLDIQRLAKEAEEWHRQRRIFLWSGAIAGVLSTIYTAYKLKLAIEREHKLDADLPSTDPLAGANAADRKIVIHDEEGREMVPTGNSTVPMFPRTLDLPAFTTPITSPSPDATATPTITTPSGTTEYTLVGLGLRTVTFVGLQVYVVGYYVATADIAALQNALTKRINPIATTLVPGEREQLRAALLDPAEGERTWDELLAAGVPARSAFRIVPVRDTDFHHLRDGFVRAVQARAGPQTMADESFGEAMRQFRAVFNRGSAPKRKELLLVRDETGRLSIAYDGGANKKEGRPAGRQLIGVVEDERLSRALWLNYLAGKKVASEPARQNIVEGIMGFVERPVGTVASQVVPVLNPKV

SEQ ID NO: 3634 - DNA, 606 bp, Myceliophthora thermophilia
atgtcgctacgacgtatcctcgtagtcagcctcggcaacccgggcgagctgcgcaacacgtaccactcggcgggccacatggtgctggaggcgctgcagaggacgctcgggcgggagcagccgccgttcgcgccggcgcggatcggcaaggcgagcgcgctggcgtcgatcggggcgcgctactcgctgctgcagagccccgccgtcatgaacgtgtccgggccgtgggtcgcccgggcgtaccgggagcacctgagcgagcgggggctggcgccgtccgaggtcgggttcgtgctcgtgcacgacgacctcgaggaggagctgggcgtggtcaagatccgggactggaagcggagccaccgcggacacaacggcatcaagagcgtcaacggagccctccaggccgacccggccggcaagtgggcgcgcgtctcgatcggcatcggcaggccggacgcccgggacaagaggtccgtgtcggactttgtgctgagcaaggtgccccggcacgagcgcggcgtcctggaggggagcggcagccggggtttattcgacgcgctggccgagctggagaggaagtggggtgggaccaactccaggttgtag

SEQ ID NO: 3635 - protein, 201 aa, Myceliophthora thermophilia
MSLRRILVVSLGNPGELRNTYHSAGHMVLEALQRTLGREQPPFAPARIGKASALASIGARYSLLQSPAVMNVSGPWVARAYREHLSERGLAPSEVGFVLVHDDLEEELGVVKIRDWKRSHRGHNGIKSVNGALQADPAGKWARVSIGIGRPDARDKRSVSDFVLSKVPRHERGVLEGSGSRGLFDALAELERKWGGTNSRL

SEQ ID NO: 3636 - DNA, 1344 bp, Myceliophthora thermophilia
atgcacatcaccaagaagttcgaccgcgcctttcagtgggccggtgagaagatgggtggcgaggccaagaccaccatgtcagaagaattcaagatgctcgaaaccgagatggcactgcgcttcgatggcatggaacgtctccagagatcaatgaaccagtacgtcaagtggatgggccgacacctcgacgcttcggaggacaaagagaaagcgctccctgttggatacttgggccgtaccatggccaaccacggcgaggagttccaagcagactccgagtttggcaactgcctcataacgatgggtcgcgccaacgaacggctgtcggccatccaggaggcctttgttgctgatgccactgcctcttggctgggatccctcgagaggtccttggccatgatgaaggagtaccaggccgcccgtaagaagcttgagaaccgtcggctgaactacgacgccagcatcggcaagctccaaaaagcaaaacgtgacgattttcgtcttgaagaggaactccgggccgcgaaggtcaagtatgaagagtcgaccgaagacgtcctccgccgcatgcaagacattcaggaagctgaagtggacaacacccgggatttgacccgtttcctggacgctgagcttgaataccacgagcggtgtgcggaggagctccgtcgcgtccgccaaaactggcccgccacgtcctctccaagctacagccctgtcgaaccccgcgcagcctttcgcaaccgctccggcaccacgagcagttccaccgagcgcctgtcccgcgcagccactttcgacgagtcgagcgcgccgccggtccgcatgcccatccgccccgctcactcgcgcgttcaatcctcgccgcagaaggtcgacgggcccgtccggccgacaattggcagcaaaccaaacaccagcggtgccagctttcaaggtgattccatcatcagccgcgatcgcggcgccagtatgagcagtatcgcgaccccgtccccgatcaacgacgtgaccgctcttcgcggaaagctgcgccccatcagcagaatcttcagttccggaaacacgacgcgggaccagagcaacaacaacaacagcaatagtaataaaaacggcgtctttgccgatggctacagcgacggcgacgacacggcgagcgacgcgggcagcccgaactggagcaaccggagcaccagctcggctgccagcagcgttgggagtctgagtcggagtccgagtgaaatcacggtgacgggcgtcaagaaggcgccgcccccgccgccgccgagcagggccaaaaagccgtccctgcccgtgcccgcgagagggggggttgggtactga

SEQ ID NO: 3637 - protein, 447 aa, Myceliophthora thermophilia
MHITKKFDRAFQWAGEKMGGEAKTTMSEEFKMLETEMALRFDGMERLQRSMNQYVKWMGRHLDASEDKEKALPVGYLGRTMANHGEEFQADSEFGNCLITMGRANERLSAIQEAFVADATASWLGSLERSLAMMKEYQAARKKLENRRLNYDASIGKLQKAKRDDFRLEEELRAAKVKYEESTEDVLRRMQDIQEAEVDNTRDLTRFLDAELEYHERCAEELRRVRQNWPATSSPSYSPVEPRAAFRNRSGTTSSSTERLSRAATFDESSAPPVRMPIRPAHSRVQSSPQKVDGPVRPTIGSKPNTSGASFQGDSIISRDRGASMSSIATPSPINDVTALRGKLRPISRIFSSGNTTRDQSNNNNSNSNKNGVFADGYSDGDDTASDAGSPNWSNRSTSSAASSVGSLSRSPSEITVTGVKKAPPPPPPSRAKKPSLPVPARGGVGY

SEQ ID NO: 3638 - DNA, 1464 bp, Myceliophthora thermophilia
atggcgctccgcagttcacacaccccaggcctgcggcgcggcgtccaagcggaccggctgcggcacccctgccgccaagaggcgctaaactttaccgcctgccatgggggctggaccgtgacgccaactgaatcgccgagcctccctttgcttcccgcaccacccgccgagaggatcgccgccatggctaccgaagatgagcggtaccgtcagtcgtcgcagtaccagctgtggtctttctcgcccgcccagctggccgagatgcgagagaagaccaacgcggcggctcgcgcgcgaatcgccgaacgcctatcttcgctccctgcccactccaacagcacttctaccccggcctcgagcgtgaacactcccgatcccgatggcacgcccgccccggcgctccccgagtttctcaccgccgcagaagaagcacagctggtaaccttctttacctcggagctgttgcgggcgggcgaccatgccgagatgtcggacgagatcaaggcgaccgcggccgccttcttccggagattctacgttacaaatagcataatgacatacccaccccaggagatgttgatagtggccttgttctttggctgcaaagccgaggggtccttcgtgagcatctcagattttgtcaagacgtttgggaaagataacccagaagaagtcctggcgggcgagttcctactctgccaaggccttcggttcgccatcgacgtgaagcaccccttccgcgccctgcgcggggccttgatggagctcgccgctctccccgacattgaccgagcccgcctgggtgcggcagagacccgtgctcgcgaaatcctgcgcttcagccccctcatcacggacgcctacttccactacacccccagccagatcatgcttgccgcgctctccctcgcagaccgcggcctcgccgagcgcctcataacaaagacctttcaccacgtctccccgccccccgactccggcgccgacacgccttctgcttccgggaccgactccgggggcgccgccgccccttccaagacgcctgccgtccgccccggcgaagacaaagcgcaaatcatcggctcccacctccgcgataaagtcctcggaaccatcgaagcctgccgggaaatgctggcgaaggagcttcccgagaggagggaacactggacaaataaagccgtgatcaaggcgcagatcacccctctccgcaagaagctcaacaagtgtcgcgacccggagcgctggaacttgatcgagctgcagcggacgcggcgccagcaggcctcaaagaaggccgactccgaagacgatgatcccgatgaccgcaaagacggtggcaacacgttgcagagcgacgcggccgtgtttggggagccgctggctgcctcgcgggataataagcggaggaaggtccaagggaacgggacagggctggatgatcctttcggaggccctttgtga

SEQ ID NO: 3639 - protein, 487 aa, Myceliophthora thermophilia
MALRSSHTPGLRRGVQADRLRHPCRQEALNFTACHGGWTVTPTESPSLPLLPAPPAERIAAMATEDERYRQSSQYQLWSFSPAQLAEMREKTNAAARARIAERLSSLPAHSNSTSTPASSVNTPDPDGTPAPALPEFLTAAEEAQLVTFFTSELLRAGDHAEMSDEIKATAAAFFRRFYVTNSIMTYPPQEMLIVALFFGCKAEGSFVSISDFVKTFGKDNPEEVLAGEFLLCQGLRFAIDVKHPFRALRGALMELAALPDIDRARLGAAETRAREILRFSPLITDAYFHYTPSQIMLAALSLADRGLAERLITKTFHHVSPPPDSGADTPSASGTDSGGAAAPSKTPAVRPGEDKAQIIGSHLRDKVLGTIEACREMLAKELPERREHWTNKAVIKAQITPLRKKLNKCRDPERWNLIELQRTRRQQASKKADSEDDDPDDRKDGGNTLQSDAAVFGEPLAASRDNKRRKVQGNGTGLDDPFGGPL

SEQ ID NO: 3640 - DNA, 2991 bp, Myceliophthora thermophilia
atgccctctttgcgaagtagactacacaaaacaactcggcggtggcgcgctgttttcgaaaggcgcactgaccgggagagcagcacgttccagggctcccagacgtccgatcagccgcgcaccaggacgactacagatgcaggaagcccacagatgcacaagccctcagatttcccatctgatccgcctctttcatccccttctccaccagctgccaatcctgcccacgtattgttgtcgtcaagccacccaaccatgggtaaccaacatcaatcaggtatcggcccggctcctcaagtggacgaatgtcaccaaggatcgatagagagccccatcgaaagcctcactgcatctttgtcaagtgctaatcttgcttcccaacttcaagatcttatgagttccccttccagtgtcgactacgatctagacgagctttttagcttgccgaccggaaactcgagtaacgtccacatccctccgatgatatctccgatggagccctcgctcttcccttctgaagcgacaaacagcactcgaaagcgatggacgcaagatggtagcgatcgaaaagttgctgggcttctgcaagagaagctgactcgccaggatgggccctctccagcgtcgaagcaaagtgcccaagaccggagagttgatgttgacctgttagccgagtatcgcaagcgtctgagaaccagatcttgcgctgcctgcaaaacgcccatcgagaccgacgccgccgaccttatcagaaggacagggaaaatgctaaaagagtcgccaacaactccgtcatcgccatcgtccaagcgagcagtcaagatatgttacgcaaaggcggaatcgtcatcgagcctggggccgttcgcagcgaagagcagaagtcgaaactcgcagtcgcagctctccaaaggcaccggatacggagacagcttcccgaagcgggagaagaaggttggtccaggtttgcaagatgctgaccgcagcacccgcgaattgcagctctactttgaggctctttcgtcggtcctgccctcgggcaaaagggaaacaacggcattcgatcgtctccctcagccggccgtctccgagatgctgtggagaagtccaatattggaacatgcttccgaattgcttaggtacgcttcgatcgaggagatgaccaagcaatacgaccctatagcagcagttttggacttcatggaaaccgtcttgagccataacagtacccgcccatttctcgtccgtgaaaggatccttttccacccgggagagcgactgcctcacttcattctaggaagaacctcaaagggacgggccaccagggttagtactgcgtacgagaccgcacaatccctgtctaccatcacgcagcatctggcggtcccttgtcggaagttcatcgaagtgtcccgccgcattgcaaacattgatggggaagaggagggaggaaggctgcttgagatggtgcaacgaatctgcaccatctccgaccgtctttccgttcttcgctcgcggctcgcgatcgaggaggtcgacccggcccgcggaccagtttcctcgtccttaaccctaccaacaacaaatgtcgccacgcgcaggatgcgtgcagacgccgacaaagtagctcgggatgtggcacatcaggaggggttgacaagagcagccgagtttcaccgggaaaactgtgttaaggaagtttcggatgacttgattgtgagcagttcctgctacgagaaggaggcacgagaggcagaaaagtcagagcctgcaccgggacggatgagaaagctcctcgctcaagtctcgtccttaagcgccgatcttcctcaaggaatttacgttcggcacggtgaaagccgcctcgatgtgctgaaggtcttgattgttggcccagccgacaccccctacgagcacggcctgttcgagtttgacatgttttgcggcagcgacttcccacaacgaccaccgaagatgttctttcgaacaacaggaggcgggcgcgttcgcttcaacccgaatctgtacaacactggcaagatctgcttctcgttgctggggacatgggatggccaaccatgggaaccggactgctcgtctattctgcagctcttggtttcgatacaaggtatggctcttgttctcaacaccatgattttcaacgaccaaccctactacaacgagcctggcttcgaataccataatgatcccgcacgagtccaagcgtacaacaggaatattgagcacctaactgtccggtacgccttgaactcatggttggcagaacggttggctggtcctacccaaccttccgtggcaacccacccatcgacccctaaagagacggcacccctgcaacagtcccaagaaacgaccgaacaacccttaactccaaaacatccgccgcaggtcacggcgcacgatagtcagccaggacccagggaagccactgaccacttgactggggccctccatcagcaatcaatgcccgccaattcgcacccaagcgctcagctgcctgtccagggaaaaaccggaaactctaccacctacgcgcccccaagcacttcaatggcaactccgacatcaaccacaggctcccacagtcagctggacggctggacggcgaatcaacccaagtcaagccaaataccagctgttctctcacatttgcagtccactcttaccaaccacatagattccctgatgcctattgagttgttaagcagtccaatgatatctccgttcatcccggaggagctctcattttatacaactcccgagccaatcccccctccgtcttgcccgtctcctccagaagaagacgaccccatatttggcgacatcgtccgcgagcacttcaggctcagggcggggatgataatggaaacagtacgcaactgggaaaagcagaccgggaaggggccagggataggagaggccgttgcgactcttgaaagccagctgaagcggcatgggtttatcaactaa

SEQ ID NO: 3641 - protein, 996 aa, Myceliophthora thermophilia
MPSLRSRLHKTTRRWRAVFERRTDRESSTFQGSQTSDQPRTRTTTDAGSPQMHKPSDFPSDPPLSSPSPPAANPAHVLLSSSHPTMGNQHQSGIGPAPQVDECHQGSIESPIESLTASLSSANLASQLQDLMSSPSSVDYDLDELFSLPTGNSSNVHIPPMISPMEPSLFPSEATNSTRKRWTQDGSDRKVAGLLQEKLTRQDGPSPASKQSAQDRRVDVDLLAEYRKRLRTRSCAACKTPIETDAADLIRRTGKMLKESPTTPSSPSSKRAVKICYAKAESSSSLGPFAAKSRSRNSQSQLSKGTGYGDSFPKREKKVGPGLQDADRSTRELQLYFEALSSVLPSGKRETTAFDRLPQPAVSEMLWRSPILEHASELLRYASIEEMTKQYDPIAAVLDFMETVLSHNSTRPFLVRERILFHPGERLPHFILGRTSKGRATRVSTAYETAQSLSTITQHLAVPCRKFIEVSRRIANIDGEEEGGRLLEMVQRICTISDRLSVLRSRLAIEEVDPARGPVSSSLTLPTTNVATRRMRADADKVARDVAHQEGLTRAAEFHRENCVKEVSDDLIVSSSCYEKEAREAEKSEPAPGRMRKLLAQVSSLSADLPQGIYVRHGESRLDVLKVLIVGPADTPYEHGLFEFDMFCGSDFPQRPPKMFFRTTGGGRVRFNPNLYNTGKICFSLLGTWDGQPWEPDCSSILQLLVSIQGMALVLNTMIFNDQPYYNEPGFEYHNDPARVQAYNRNIEHLTVRYALNSWLAERLAGPTQPSVATHPSTPKETAPLQQSQETTEQPLTPKHPPQVTAHDSQPGPREATDHLTGALHQQSMPANSHPSAQLPVQGKTGNSTTYAPPSTSMATPTSTTGSHSQLDGWTANQPKSSQIPAVLSHLQSTLTNHIDSLMPIELLSSPMISPFIPEELSFYTTPEPIPPPSCPSPPEEDDPIFGDIVREHFRLRAGMIMETVRNWEKQTGKGPGIGEAVATLESQLKRHGFIN

SEQ ID NO: 3642 - DNA, 276 bp, Myceliophthora thermophilia
atgcatgcagatgccgcctgggccaccgacacaaatgggccaatcaagccgaagaatgatagaccaatcaggacaggatcacacttggcaagaaacgatcctagcagaggatcactggctcacgacgtgagccagacgacctgcctgcctgtcccgctcaatccaccttcgtctgaaccctttcagaagaagtctgagctgggttcgtcacaatttatagcatttatagcaaatctggatttaggggtacttttggccgactacgcgttagattga

SEQ ID NO: 3643 - protein, 91 aa, Myceliophthora thermophilia
MHADAAWATDTNGPIKPKNDRPIRTGSHLARNDPSRGSLAHDVSQTTCLPVPLNPPSSEPFQKKSELGSSQFIAFIANLDLGVLLADYALD

SEQ ID NO: 3644 - DNA, 1431 bp, Myceliophthora thermophilia
atgtcagccgggcccgtcgacgaatatacgggcgtcgagggcgttgccgaccccggcggcaactccctgaccgacaatctcaacctctactactcggatggcgacttcgcgtggatcatgacatgctcggccctcgtcctcctcatggtcccgggcgtcgggttcttctatagcggtctcgcacgccgcaagtcggcgctggctctcatctggctggccctcatatccatcgccgtcgctggattccagtggttcttctggggttactcgctcaccttctcccacacgggcagcgcctatatcggagacctcagcaacttcggcttgatgaaagtcctcggccagcccagcgtcggcagctccaagatccccgacatcttgttctgcctctaccagggcatgttcgccgccatcacacccgccctcgccattggtgccgccgccgatcgcggccgcatgcttccctgcatcgttttcatcttcatctgggcgaccatcgtgtacgacccgatcgcgtactggacctggaacgccaacggctggtccttcaagatgggcggcctcgacttcgccggcggcaccccggtccacatcagctcgggcgccgccgccctcgcctactcgctcatgctcggcaagcgcgccggctacaacaaggtcaacggcctgccgtaccgcccgcacaacgtcacccacgtcgtcctgggcaccgtcttcctctgggtcggctggttcggcttcaacggcggcagcgccctggcgtccaacatgcgcgccgtcatggcctgcgtggtgacgcacatcgccgcctgcgtcggcggcctgacctggtgcctgctcgactaccggctggagaggaagtggagcacggtcggcttctgcagcggcgccatcgccggcctggtcgccatcacgcccggctccggcttcgtcccgccctggtcggccttcatcttcggcgtggtcggcggcgtcgtgtgcaactttgccaccaagctcaagttcctgatcggcatcgacgacgcgctcgatatctttgccgagcacgccgtgggcggcatcgtgggcaacatcctcacggctttctttgctgctgactacattgcccacctcgatggctccaccgagattcccggcggctgggtcaatcaccactgggtccagctcggctaccagattgctgacagcgttgctgggttcgcctactcgttcgtcttgacctgcgtgatcctgttcctcatgaatctcatccctggcctgtcgctgcgggttagtgccgaggaggaggacatcggtctcgatgacggccagctcggcgagtttgcctacgactacgtcgagatcactcgtcacattgacggcgccgggactggcacctctagcagcccgcttcatagcatcaagggggccattccggagaagacagtctaa

SEQ ID NO: 3645 - protein, 476 aa, Myceliophthora thermophilia
MSAGPVDEYTGVEGVADPGGNSLTDNLNLYYSDGDFAWIMTCSALVLLMVPGVGFFYSGLARRKSALALIWLALISIAVAGFQWFFWGYSLTFSHTGSAYIGDLSNFGLMKVLGQPSVGSSKIPDILFCLYQGMFAAITPALAIGAAADRGRMLPCIVFIFIWATIVYDPIAYWTWNANGWSFKMGGLDFAGGTPVHISSGAAALAYSLMLGKRAGYNKVNGLPYRPHNVTHVVLGTVFLWVGWFGFNGGSALASNMRAVMACVVTHIAACVGGLTWCLLDYRLERKWSTVGFCSGAIAGLVAITPGSGFVPPWSAFIFGVVGGVVCNFATKLKFLIGIDDALDIFAEHAVGGIVGNILTAFFAADYIAHLDGSTEIPGGWVNHHWVQLGYQIADSVAGFAYSFVLTCVILFLMNLIPGLSLRVSAEEEDIGLDDGQLGEFAYDYVEITRHIDGAGTGTSSSPLHSIKGAIPEKTV

SEQ ID NO: 3646 - DNA, 840 bp, Myceliophthora thermophilia
atgtcggctccgaccaacaccatctcctcctgctgcctgcgcgcctccctctgggagggcacgcccaccggcaccgagaccaagctcgccggggtgccgaacccgacctacgtcgcccggccgccgaccccgtcccgcgccgcgctcctgtacgtccacgacatgctgggctggacgttccccaacgcgcggctgctggccgacgcgtacgcgcgcgaggccggcgtgaccgtctacgtgcccgacttcttcggcggcgaggtggtgccggccgagccggtgctggcgggccgcttcgacgagctcgacgtggccggcttcgcggcgcgcaacgcccgcgaggtgcgcgagcccgaggtggtggccttcgcgcgggccctgcgcgccagcggcgagtacgacttcgtcgccgccgtcgggttctgctacggcggctgggccgtcctccggctcggttccgccgagttcgccaccaccgaccccgccggtgccggtgccggtgccggtgccggcgaagacggacaagaacgccgccccctggtcgacgtcgtctcggccgcccacccgtcctggctggtcgagagcgacgtggagggggtcacggtgcccgtgcagatcctcgcgaccgagcacgaccccgtctacacgcccgagctcaaggccttcacgttttccacgctgcagaagaaggggttgccgttcgactaccagcacttccccgggatcgagcacggcgctctggtcaggggcagcgacaagatcaagggcgagagagaggccatggttagggcgaagaacgcgcttgtcgcttggctccggcagtggattcaggacctgtaa

SEQ ID NO: 3647 - protein, 279 aa, Myceliophthora thermophilia
MSAPTNTISSCCLRASLWEGTPTGTETKLAGVPNPTYVARPPTPSRAALLYVHDMLGWTFPNARLLADAYAREAGVTVYVPDFFGGEVVPAEPVLAGRFDELDVAGFAARNAREVREPEVVAFARALRASGEYDFVAAVGFCYGGWAVLRLGSAEFATTDPAGAGAGAGAGEDGQERRPLVDVVSAAHPSWLVESDVEGVTVPVQILATEHDPVYTPELKAFTFSTLQKKGLPFDYQHFPGIEHGALVRGSDKIKGEREAMVRAKNALVAWLRQWIQDL

SEQ ID NO: 3648 - DNA, 831 bp, Myceliophthora thermophilia
atgcccagtttgtgcgagaataactgtattgcgtcaaagctggggggacatccactttcgcttggtacgcacaggagcatgcgggcactattatgtccggcaatgtgggtccagccggatcggaccgaccggacccgcgagatcggcgccggctccgcctcactaacggcccctgagcatattcggatggttcttgtggtacctcccaaaagaagacgagatttagaagcgaatgcgcgacgaagtgctctacaaattttgggttctggtgaccgggacgttgactgcctgcgggactgtataattgatccacaaccgtttggttgcaacgacgcacgtcgaagtcttccatctctggaccgagtccgaccgcccgtcctcgtccacctcgtcctccaccaccaacactccgccactgcggacgccgtcaccaccacgacagagatccagcgagcgaagaagcagccgcgtcgacagcagcaacaccctctcgtccgcccgcccgctcccctcgtcactaaattattactacccgcagacaccatcgcccatgctgagtccgacatgacccggcgggagcccatcaagggcgggcccgccgccaccgcccagggcctgcacgaccgccagcagaacttcttgcaggtcgccggcggcgtcgcccgcaagccgagcttcgaggtgaccaaggaggatgccaagaagatccagcacttcgaggtgcgttttgccctaacatttctttgtgttaccaggattacgtttatggttaccattaataccccgatcgcacagtctattcatgtaatgaacaatcgggaaaaagaatag

SEQ ID NO: 3649 - protein, 276 aa, Myceliophthora thermophilia
MPSLCENNCIASKLGGHPLSLGTHRSMRALLCPAMWVQPDRTDRTREIGAGSASLTAPEHIRMVLVVPPKRRRDLEANARRSALQILGSGDRDVDCLRDCIIDPQPFGCNDARRSLPSLDRVRPPVLVHLVLHHQHSATADAVTTTTEIQRAKKQPRRQQQHPLVRPPAPLVTKLLLPADTIAHAESDMTRREPIKGGPAATAQGLHDRQQNFLQVAGGVARKPSFEVTKEDAKKIQHFEVRFALTFLCVTRITFMVTINTPIAQSIHVMNNREKE

SEQ ID NO: 3650 - DNA, 1677 bp, Myceliophthora thermophilia
atgagaggacgggagctggtagtctggttggacgcgagtcgcggaacacaacacgttgctcacctgcgcgacgcctcgttcaacagggaaaggaagttgctttttgtctacatggatcttttccgcggcggggacctctacgatttcacgtacgatattctagatgggaaacacggggatattctagaggagaaacactgggatatcgtccatccgttcctcgttttccatctagcctgcgaggtggcctttgggctcagcgagattcacgcaaagggcatcatgcatcgggacctcaagctcgacaacgtcttgcttacccacaagattaccccgcgcatgaactctgccctgtgtcgattgacaagcggggagatcctggacaccaaggacgaaaagaatatccaggagctgttcgacatcgtgtttcggaagtctgaccgagatgacccgttagccctcttgactgatttcggcctctcacgaaatcttaacgatgagaacctgaggtcaaattacaccgtggttgggatgaaacccaaatggaccaaaggcatcagcgcgcccgaactggttcaccacaatcatcagtcactcatggctgatatctacagcttcggcgtcctcgtctacgtcatgtgcacaggggattggcccgaggaagcagacccattgcggcagaagtttaaagatatatccaagtattacggcagggatctgcaggacctcgtggatcgctgcctaaaccacgatgcctcgcagcgcccggattcagaggagctgatccaaacgctctggcccctgagggtggcggccgcaaatagggccaagtatcatctggagaagctatcaaactacaaacaacacgtgcagcaaatcatagaagatcaaaagtattcgaatcaggtgaaagcgacggccaagagacatcacgatatgggaaaggaggcatggcggcgcgatcttgctagatgggagaaatatcaagaggagcagaagcgcctcgaccagctccgcgagaaacatctccagcaagccaggtacggcggcggcgttccgcagcccgcgatcctgcacgggacgcacgtgagggacgcacgaggtatccggaccctcgggatgcacgtgaggaacggacgagatatccggatcctcgggacgcacgtgaggaacggacaaggtatccggatcctcgggacgcacgtgaggaacggacgaggtatccggatcctcgggacgcacgtgagggacggacgaagtatccggatcctcgggacgcacgtgaggaacggacgaggtatccggatcctctggacgcacgtgaggaacggacaaggtatccggatcctcgggatgcacgtgagggacggacgaagtatccggatccttcgcgagccccaagagatcgttcgagagccccgagagatcggtcgcaccaaggcggtgtacgtcgacgatctgagcacggggatggccgagatgcatgtggacgacaggcacaacaggactaggcgggaaaagcgcgccgacgacattgacaagtattacacctatgttacccccggcgaaacgtctcatcatcacggcagagcgcatgatgaccgcagagggaatgctggctacgtttacgacgaccagacgtatcatcatgccgacaaagggcgaagtcgccgttga

SEQ ID NO: 3651 - protein, 558 aa, Myceliophthora thermophilia
MRGRELVVWLDASRGTQHVAHLRDASFNRERKLLFVYMDLFRGGDLYDFTYDILDGKHGDILEEKHWDIVHPFLVFHLACEVAFGLSEIHAKGIMHRDLKLDNVLLTHKITPRMNSALCRLTSGEILDTKDEKNIQELFDIVFRKSDRDDPLALLTDFGLSRNLNDENLRSNYTVVGMKPKWTKGISAPELVHHNHQSLMADIYSFGVLVYVMCTGDWPEEADPLRQKFKDISKYYGRDLQDLVDRCLNHDASQRPDSEELIQTLWPLRVAAANRAKYHLEKLSNYKQHVQQIIEDQKYSNQVKATAKRHHDMGKEAWRRDLARWEKYQEEQKRLDQLREKHLQQARYGGGVPQPAILHGTHVRDARGIRTLGMHVRNGRDIRILGTHVRNGQGIRILGTHVRNGRGIRILGTHVRDGRSIRILGTHVRNGRGIRILWTHVRNGQGIRILGMHVRDGRSIRILREPQEIVREPREIGRTKAVYVDDLSTGMAEMHVDDRHNRTRREKRADDIDKYYTYVTPGETSHHHGRAHDDRRGNAGYVYDDQTYHHADKGRSRR

SEQ ID NO: 3652 - DNA, 123 bp, Myceliophthora thermophilia
atgatgatcgtcgacagattggtttcgcgactcagcccttccacgcgcctccgctgcatcccatcggagaacctcgcagcatctgaggaggatgagggattgtggcgtggaggcatggcttga

SEQ ID NO: 3653 - protein, 40 aa, Myceliophthora thermophilia
MMIVDRLVSRLSPSTRLRCIPSENLAASEEDEGLWRGGMA

SEQ ID NO: 3654 - DNA, 345 bp, Myceliophthora thermophilia
atgcatcttttgacccatcgccatgacatcgttgcggaaactaggcaaggcgatctccagtacgaagtaacctcgtacccacctaagtacaagactcgggggctttaccgcgccctttgtttgagagctatgccacattgtagcagcttcctggtacgcgtgctttgttgctacgccgcaacgttcgagcgagagccggctgcagcagagaagtcgtcggctgagttgaaacctgcagccttgaaacccccgatttcgcacacgtactacaatctccagagagacaactcacttgctgagatgttgggaagttccatgtttggaagcatatccatggatcgttaa

SEQ ID NO: 3655 - protein, 114 aa, Myceliophthora thermophilia
MHLLTHRHDIVAETRQGDLQYEVTSYPPKYKTRGLYRALCLRAMPHCSSFLVRVLCCYAATFEREPAAAEKSSAELKPAALKPPISHTYYNLQRDNSLAEMLGSSMFGSISMDR

SEQ ID NO: 3656 - DNA, 1608 bp, Myceliophthora thermophilia
atgggattcaagacagccgacctctggcgaaagccagacctcaacccagtcaacaggaaggccaaaagcgtgcccgtcctgaaccccattgatcggcatggccgcgtcttcttcttctcgtggcttggcttcatgctggccttctgggcttggtacgcctttccgccattgttgacagtcaccatcaaaaaagacctgggcctgactccggagcaagtggccaactccaacattgtctccctggtagccacgctggcggtgcgcttcgtctgcggcccgctctgcgacctctggggcccacgtaaggtgttcagcgcgattctgctggttggcagcattcccatcgggctcgcccccctgatcaaggacgcgaccggcctctacattatccgcctcttcattggcatcctgggtgggtctttcgtgccctgccaggtctggtgcaccggatggttcgacaagacggtcgtcggaacagccaatgctctgtcgggcggttggggcaatgctggcggcgggatcacctactttatcatgccagccgtctttgactcgttggtacatcactggggacacacacatcgtgaagcatggcgtatcgccttcgttgtacccctgatctgtctgatcgcctgcggaatcgggatgttggtgctgtgcgaggatacgcccatgggcaagtggagcgagcgccacaacgttggacgagatctcgaagccagggacatctcgggcgccgtcgtctccgttccgggcaccattgccgaccgcgaaccgtcgggagcgacaacgccggccggcggcaaagtttcatccgacgacctagaaaaaggcagtaccgacgacaagaaatctccctttccaccggcgacaacaacaacagcagcctcgtccccccatgcgacaagcaccaatcttgccctccctggcgcgacagccatgatggaaacggcgcacgccgaagtcatccaagcgccttcctttcgcacctcgctctccatcgtcttcagcctgcacgcgctcttccacgtggccacgtacgcgtgcagcttcggcggcgagctggcggtcaactcggtcctgagctcgtactacctcaagaacttcccgtacctgggccagacgcgggcgagcaactacgcggccgtgttcgggttcctcaacttcctcacgcgcccgctgggcggcgtcgtcggcgacgtgctgtacaacgtctcgggcggcaacctgtggctcaagaaggcctgggtgcacgcgtgcggcgtggtggcgggggcgctgctcgtcgtcatcggcgtcctcgacccgcacgacctcggcgtcatgatcggcctggtcgtcgtcatggccgtcttcctcgaggccggcaacggggccaacttcgccctgctgccccacgtctacccgcacgccaacggcgtcctgtccggcctgacgggcgccggcgggaacctgggcggcgtcgtgtttgccatcgtcttccgcttcatggacggggggtccgactacgcaaaggcgttttgggtcattggcgtcatgcacattgcgctgaacctggtggtctgttgggttcctcctgttcctaaagggcagattggcgggcgttaa

SEQ ID NO: 3657 - protein, 535 aa, Myceliophthora thermophilia
MGFKTADLWRKPDLNPVNRKAKSVPVLNPIDRHGRVFFFSWLGFMLAFWAWYAFPPLLTVTIKKDLGLTPEQVANSNIVSLVATLAVRFVCGPLCDLWGPRKVFSAILLVGSIPIGLAPLIKDATGLYIIRLFIGILGGSFVPCQVWCTGWFDKTVVGTANALSGGWGNAGGGITYFIMPAVFDSLVHHWGHTHREAWRIAFVVPLICLIACGIGMLVLCEDTPMGKWSERHNVGRDLEARDISGAVVSVPGTIADREPSGATTPAGGKVSSDDLEKGSTDDKKSPFPPATTTTAASSPHATSTNLALPGATAMMETAHAEVIQAPSFRTSLSIVFSLHALFHVATYACSFGGELAVNSVLSSYYLKNFPYLGQTRASNYAAVFGFLNFLTRPLGGVVGDVLYNVSGGNLWLKKAWVHACGVVAGALLVVIGVLDPHDLGVMIGLVVVMAVFLEAGNGANFALLPHVYPHANGVLSGLTGAGGNLGGVVFAIVFRFMDGGSDYAKAFWVIGVMHIALNLVVCWVPPVPKGQIGGR

SEQ ID NO: 3658 - DNA, 432 bp, Myceliophthora thermophilia
atggccattcacatgcagggccgctgcgtctgccggcggctgcggtactcgctggacctcgggtcggccgaggacgcgcgcacgacgctctgccactgccacagctgccggcgcgcgttcggcgccaactacggcctgacggccaaggtgcccctcgccgcgttccggtacgaggcgggcgagccgaggcggtacaagcaggagaacggggtgacgagggagttttgcgaccagtgcggcgcctttatctgcgagtatggggaagaggcggccgacaagttccgctacgtcgtgtggggatcgctcgatgagcctgagaaggtgccgcccaagggcgagttcttctgcaaagaccgggccgagtggatgcccgagatccaaggtatggctcggacgttggcgatcagggacggtaaaaaaccgaggctctaa

SEQ ID NO: 3659 - protein, 143 aa, Myceliophthora thermophilia
MAIHMQGRCVCRRLRYSLDLGSAEDARTTLCHCHSCRRAFGANYGLTAKVPLAAFRYEAGEPRRYKQENGVTREFCDQCGAFICEYGEEAADKFRYVVWGSLDEPEKVPPKGEFFCKDRAEWMPEIQGMARTLAIRDGKKPRL

SEQ ID NO: 3660 - DNA, 1419 bp, Myceliophthora thermophilia
atgccaatctacagcagaggaagcaggagcaggaacggcggtatcccgaccagcccgcccgcgggcttctcgttcgaccgggccgaggtcatctaccagcacgccgaccgggtcgtctggaaggtcgggcgcaggtacatcctcaagcgcgccgactttgtcgacgactccgaggcggccacgcaccggttcatctggaagtacactccgattccgctgcccaggctctacggcgagtgggtgtcgccgtcgccgccgccgttagcgttgttcagggggccgggcggcccctcccgccaacgtcgctcccaccaccaccactactaccttctggaggagcgcatcccgggccagacgctcagggactgctggggccggctgagccgggcggacgcggaggcgatcgcggagcaggtggccggctacatggaggagctggcgcggttccggggccggcggatggagaccgtgaccggggctcggctgcccaacaactgcttcaacccgcggcccgaagagccgcacgagcggctggccgggcggtgggcgaccgacgacgacgtgttcgacgggacctttgcgcccgcgctgcggcgccggggcctgggcgaggtcgtggtgcgggcgtgccggcgcacgatgccgcggtgcgaggggcagctggtcctgacgcacggggacctgtacgtgggcaacgtcgtggtcgacccggaccgggcccaggttacgggcctgatcgactgggagatggccggcttctggcccgagtggttccagtatgcccgcatcacgcacggctgcagccgcgacgacggcgagtggaagcgcgtgctcagccgcgcctcgcgtccccgcatccgccaggccgaccacggccgcgtctggctcgacgccgtcatgctgctgctctaccagcccgacagcctccgcgcccgcgcctggctgcgcctgctcttccgctaccagcgcggcgaggtcggccgcgaggccctgcggaactaccagaacatcgacgggagcgacatcaggaaccaccttgccgtgtacgaggccattctgaacaaccgaggcgggctgggagatcaggggtactacagttcggctttgcgctgggcaagtgcggtgctcgatgactccatcggtctcagagagttagtagcaaggctcaacgtgcttgcggcgtcgcgcagcgcgaagcccacgtacggctacatctacatgaaccatgtgggcaaaatgcagaacgcgtatgccggatatggccagacgaatctggatagtcgcggcgcgtcgaaaagaacttccgcaggctctgggaatgttactcaaactctgatattggtgagttgtacgagcagttggcatatgtccgccgcaggcctggccatgactgctgtggtcgagatcctgctgaattag

SEQ ID NO: 3661 - protein, 472 aa, Myceliophthora thermophilia
MPIYSRGSRSRNGGIPTSPPAGFSFDRAEVIYQHADRVVWKVGRRYILKRADFVDDSEAATHRFIWKYTPIPLPRLYGEWVSPSPPPLALFRGPGGPSRQRRSHHHHYYLLEERIPGQTLRDCWGRLSRADAEAIAEQVAGYMEELARFRGRRMETVTGARLPNNCFNPRPEEPHERLAGRWATDDDVFDGTFAPALRRRGLGEVVVRACRRTMPRCEGQLVLTHGDLYVGNVVVDPDRAQVTGLIDWEMAGFWPEWFQYARITHGCSRDDGEWKRVLSRASRPRIRQADHGRVWLDAVMLLLYQPDSLRARAWLRLLFRYQRGEVGREALRNYQNIDGSDIRNHLAVYEAILNNRGGLGDQGYYSSALRWASAVLDDSIGLRELVARLNVLAASRSAKPTYGYIYMNHVGKMQNAYAGYGQTNLDSRGASKRTSAGSGNVTQTLILVSCTSSWHMSAAGLAMTAVVEILLN

SEQ ID NO: 3662 - DNA, 2592 bp, Myceliophthora thermophilia
atggagtctcagcagacggcgcaggccccaacccgacctgccggatcgggcacatacaagcgcgcaagcaggaagggagccccgcgccgctttgcctgcgactatccaggttgcgacaagctttattcgagggccgaacacctccagcgacatcagttgaaccatgcgcccaaggagatctaccgttgcgacattgccgggtgtgaacaaaagtttgtgagagcagacttgctagcgcggcataggaaacggcattccgcctcctacgtacctagaaaccgcatgcccagcttcagtgcgaccgccgattctttgccgccggctaccgtcttgtcgccaacccccgtcaccgaagcccgcccagtcctttctcgtgctccgcatgacgccgccatcttgcttggcccggataccagctcacagccatctccgtccctgccgaaccctgatccgcgaaagatgcaccaacactccagctggcaggcccagcttcccgatgttggggcctgcaacattatccgacccaagcccggttattatccccagcagcagcagaggatcccggagcagtcggcttccatgccttaccataactccgagttccagtccgacgacatgtcccgtgagaacttcgccgtgtggttgttcaacccacacgcgccatacggcgagttcaacgtttctcatgttccctttatcgacggcggtttagagtcaacgcttaacaacaacatccattacgattatgaatcgttgacaagcggacggtctcagctcgagactcctacccgccttgccgaaaccgacgagctcctctccgagtttcgccggcaggagatacttcgctggttccaggtgtttcgccagaaacaacccaaagccgagcccctcgttgcgaacctcgtgcatgacagcaacggggatatcccggccctaggcctggagatgatgcgtgactgcctgcaggaatactgggaccgcgtatcccctcgcctccctatcgtgcacaagccgactttctcgtgcaaccgatgctccatattcctgctcatggtcatggtctccttgggcgccgtctcgctgcgaaccagggactcgacagggaacttggctgactatggaggcttcgcggacatgatcatactcggagttaggtccgaaatcctgactgctgaggaagcacaacctccggtctccttgtgggtttcccaagcattactgctgctggagttttacgaaaaaatgtactcgtctcgaagactccatgaaagagcccatatctaccataccgttgcgctcacgctcctccgccgtggaagtcccctcattggccgttccgggagcgagtcaccccccgagccgccgtcggccgatcagccgcagggtggtgctctggattctcacacctggtggtgtcgatgggctgagaccgaagcgatgcaccgggttgtttttgctgcgtttatgatggacatcatccatgccgccatgttcggacacacagcagacatggcgccacacgagattcgacttccgctaccttgcgacgacaatatgtggacagcttcgaatccagacacggtgcggcagctcgatcaaaacttgcgcatgtatggaatcaagccaatatcatttcttgatggcctgaagcgtgctctgcatggtaaggaggtcaagacccattcatttggccgcatgatcatcatgtctggccttctcagtgtcggctggcatctcagccacagggagacgcatcttaagtggctagacctgagcgcgccgtctgctgaaacccacgagacttggaagaagatcctcttgaaagcatttgacgattggaagcacagcttcgacgctgctcagggagcaacgggaaaccctaatcttaccgatgcccagggtgcgaatggccccgttcacagtgcagctgtcctttaccacctcgctcacatcagcttgcacgttgatatcgtcgactgtcaggtttatgccggcgcaaagcggttactggggaggaaggtttcggtgagagattacaccaatgtcgtcgctcgcatgagagtctggacctctctgccgtcgaccagccacgccgtcctgcacgcttttcggcttcttcaccgagtactggttgacccacgacgcggtgcgagcgcgggcgaccgcgatcggtcggatattggaccgggagccgtcatccttccatctcctgaggttcacatttattcctgccgcaacgacccggacccgcaccgcccctgggttatgtactacgcagctttgagcatctggtcctttgtgagggctgtcagtcgccaggactcgcttcacgagcccagcggccaatcggggaccccattccggcctggcaaacctttacctgtcgatcatcaacgtctggctgcctatctgtccgagattgccagtctctcagagctcacagaaaatgcagtagcaagcctgggaaatggccttccggacctgcttgatgctttaagattggtgtttgctgaggcgcattccgagctactgcaggaagcgcaagtgcggctgaggatgtgcaaagagatgctcatcaactccgctggatga

SEQ ID NO: 3663 - protein, 863 aa, Myceliophthora thermophilia
MESQQTAQAPTRPAGSGTYKRASRKGAPRRFACDYPGCDKLYSRAEHLQRHQLNHAPKEIYRCDIAGCEQKFVRADLLARHRKRHSASYVPRNRMPSFSATADSLPPATVLSPTPVTEARPVLSRAPHDAAILLGPDTSSQPSPSLPNPDPRKMHQHSSWQAQLPDVGACNIIRPKPGYYPQQQQRIPEQSASMPYHNSEFQSDDMSRENFAVWLFNPHAPYGEFNVSHVPFIDGGLESTLNNNIHYDYESLTSGRSQLETPTRLAETDELLSEFRRQEILRWFQVFRQKQPKAEPLVANLVHDSNGDIPALGLEMMRDCLQEYWDRVSPRLPIVHKPTFSCNRCSIFLLMVMVSLGAVSLRTRDSTGNLADYGGFADMIILGVRSEILTAEEAQPPVSLWVSQALLLLEFYEKMYSSRRLHERAHIYHTVALTLLRRGSPLIGRSGSESPPEPPSADQPQGGALDSHTWWCRWAETEAMHRVVFAAFMMDIIHAAMFGHTADMAPHEIRLPLPCDDNMWTASNPDTVRQLDQNLRMYGIKPISFLDGLKRALHGKEVKTHSFGRMIIMSGLLSVGWHLSHRETHLKWLDLSAPSAETHETWKKILLKAFDDWKHSFDAAQGATGNPNLTDAQGANGPVHSAAVLYHLAHISLHVDIVDCQVYAGAKRLLGRKVSVRDYTNVVARMRVWTSLPSTSHAVLHAFRLLHRVLVDPRRGASAGDRDRSDIGPGAVILPSPEVHIYSCRNDPDPHRPWVMYYAALSIWSFVRAVSRQDSLHEPSGQSGTPFRPGKPLPVDHQRLAAYLSEIASLSELTENAVASLGNGLPDLLDALRLVFAEAHSELLQEAQVRLRMCKEMLINSAG

SEQ ID NO: 3664 - DNA, 1479 bp, Myceliophthora thermophilia
atgtcggcgacaacgttcggccacaagggcatggaagccgtccagaacagggactttgcaggtgccataccactgttggataaggccctcgagtcctccagttctcctgcctggctgcttgcccgagctcaggcccaccagcaactgaagaactacgacgccgcgctcgacgatgccgcgctcgcatatcacgtcgcagcggagcgcggctcgggaaattctcggaagcagatgatcgaagcgcaatatcgtcgttccgtcctctacttcaagctcggccgttacgcagatgccgactgctgcgccaggtgggccatgcttctggccgagggccgtccggcgcgcgaggatgacggcgtcgagaagaatgttgatgagaatggcaactacaccgtgacctacgaggccgccgtggccgataagaaaggccaaccaggccaggacaacaaggcaacttggattgctgggattgcgggcggaagcgaagggggttcggcgggcaccccaaagacgggtttcgagaatgactggaagagggcatatacttggaggagccaggttcttggggccatggaaaagttgccgaatgaccacgccggtcggaaagtcagtgtgaagaagatcccggacagacctcagaagaaggcagagaagaagacggaacagaagccggagcccgaagtcgagttggcggatgatgccatggatgttgataagaccgagcccgccgggcccgccccaggaagcgtccccgacgagaagctcaagctcagggtcgatttctatcagtccaacaacaacgtcacagtttccctgtttgtgaaggatgccaataaggacgagctagacgtcaagttctccgacaactatatccagatctcgccgcttcctcgagcagcggctccctacgtgaagcccggagaccgcaaagccacgtcgacgattatcctcggcggacgaatcgatccttccaagtctcgttattccgttacatctcggaaaatcgagctggtcctccagaaggtgacacccggtgtcaaatggggttcctggggtagggaggagatcggccccgcttcggaagaactcactaccagcgctggtccgggatcgacgaccgcttcagccaaccagccggagagcgcatctcgcgcctcagtctcttcaccacctgctgctcagccaccgacgaccgccactacctccgccgccccagcctaccccacgagcagccgttcaggccctaagaactgggataagctgggtgaagccgaggccgaggacgatgttgacaagcaggacgtcaactacttctttaagcagctctacaagggcgcgacaccagagcaacagcgggctatgatgaagagcttcatcgagagcaacgggacggcgctcagcaccgattggaacgatgtcaaggatcgcaaagtcgagaccgtcccgcccgagggcgttgaggccaagaagtgggagtga

SEQ ID NO: 3665 - protein, 492 aa, Myceliophthora thermophilia
MSATTFGHKGMEAVQNRDFAGAIPLLDKALESSSSPAWLLARAQAHQQLKNYDAALDDAALAYHVAAERGSGNSRKQMIEAQYRRSVLYFKLGRYADADCCARWAMLLAEGRPAREDDGVEKNVDENGNYTVTYEAAVADKKGQPGQDNKATWIAGIAGGSEGGSAGTPKTGFENDWKRAYTWRSQVLGAMEKLPNDHAGRKVSVKKIPDRPQKKAEKKTEQKPEPEVELADDAMDVDKTEPAGPAPGSVPDEKLKLRVDFYQSNNNVTVSLFVKDANKDELDVKFSDNYIQISPLPRAAAPYVKPGDRKATSTIILGGRIDPSKSRYSVTSRKIELVLQKVTPGVKWGSWGREEIGPASEELTTSAGPGSTTASANQPESASRASVSSPPAAQPPTTATTSAAPAYPTSSRSGPKNWDKLGEAEAEDDVDKQDVNYFFKQLYKGATPEQQRAMMKSFIESNGTALSTDWNDVKDRKVETVPPEGVEAKKWE

SEQ ID NO: 3666 - DNA, 4845 bp, Myceliophthora thermophilia
atggcaggaaccggccagcgaaatgccacagaagcgtcccgggaccggcccggaaacgtcgaattacagcagcagaactcgagcgctccctccgacgctggcgttgcccgagggaatccccaggatggagagccttcgccgctaacacgttcgcgcccggtcccgagtctccatcttccccgggccggactccgttcttacggctacgacgagaccagatcgcctcgttctcggcaaccgcagtcgcctctgcaacggaggactccggaactctacacgatccagtcgcacaccctagcaccgccggcgaaggaagatggccaagacagacgcgatggtccttcgaccgcctctccacgccctcgcttaggccagccgaggatatccttgacccgcccccgccagacctttgacgagatgcgagacagcatcaaacttcccgttgacgccgaaaagagcagcgccacgctttcacagctgggttgggttggacggcaaaagaggcggaagagggggctcgggagaattccgtgggccaagatacagaacgctgccgacagggcgtaccatcgatacattatcgagggcttgttgcggcaaaagcccattccgccgagccaggatgggaggcatatccccctcaagcccggcctggtaaggcgaaagcccctcaaagatgagcggaccgggcgaccttacgtgtccaacttcatacggtcgagccggtataccctctggaattttctgcccaagcagctctttttccagttcagcaagctcgccaacttctacttcctcgtcatcggtatcctgcaaatgatcccaaacttgagcaccacaggcacgtacacgaccattgggcccctccttgcctttgtggcactcagcatggcaaaggagggctacgacgattatcgccggtacaggctcgacaagttggagaacaggagcttggtttgcgtgctggacccggacggcgcggccaaaagcgagccgagatccgacggtcgcgcatcgccgggtttctttcgacggggaaagccggttcgcgatgcagggacgcaggtgacggagctcgaatcggtgggcagctccgaagacgcagaatctgggcaatggaccaagattgagtggcaggatctccgtgtgggagacatcatacggctacatcgtgacgaggatgtacccgccgacattatcctgctccatgccacgggaccaaacggcgttgccttcatcgagacgatggctctggacggggagacgaatctgaagaccaaacaggcgtgccccctgctcgccaagcactgttcttcggttgccggcatgaaggactgcgaagctgagatcgtgtcggaggatcccaacatcgatctctacaactacgagggcagagtgaccgtgaacggcgagaccatgccgttgaccctgagcgaggtcgtttacaggggatcgaccctgcgaaacacggcgtacgctatcgggctcgtcatcaacagcggcgaggaatgcaagatccgcatgaacgccaacaggaatgtccgcgcaaaagcacccgagttacagcacgccgtcaaccgcatcgtcatcatgctggtattttttgtcatcatcctcagcgtcggttgcacggttggctacatcctctggcgccgccaatacgtgggagcatctgaccagccgcgcgcctggtatctccaaggcgggaacgtgccgctgcagcaaatcttcattgcctttgtcatcgcttacaacacgctgatcccgctgtcgttgtatgtcagtctcgagattgtcaagctcgggcagctgttcctactcagcgatatcgagatgtacgacccggtcacggatacgcccatggtggccaacacgacgaccatcttggagaatctgggccaggtcagctacgtcttttccgacaagacgggcaccctgaccgagaacatgatgaagttccgcaagatgagcgttgccgggaccgcgtggctccacgacatggatctgcggacggaagccgacaagaagggcaaggcgccggtggttgagaaagaagggaagggccgctccttgaacgccagaacgtcgacaagccaggtggaatcggaaatggaggagcccctggtcgacggccgtcctccacggacgagcaccgcctcgagatggaagtcgtcggccaaccctacacaaagccagcccgaactcggcaacacggaggagctgcttcggtatctcgccaacaagccccactcgcagttttcgcgcaaagctcgccagttcatcctctgcctagccctgtgtcacacttgtctccccgaaacgggagacgacggggcgataagcttccaggctgcttcccccgacgagcttgcactggtcgaggctgccaaagacctgggttatctgctggttgatagagccgctcagtccatgacgctgcaagtacgcaccccgaatggcccgaccatcaccgagaagtatgagattctggacgtgatcgaattcaacagcaggcggaagcgcatgtccattgtcattcgcctgcccgatggcaggcggtgcatctttaccaagggtgccgacagcgtcatcctgccgcgcttgaagcagaagcagcttgccttccagactgcctctgccgtcgagaggagggcaagcatgcggaggagcgtcgagcaggaaaaggctctgcgccgacagagcatgcagagctacaagcgtgacagcatgaccctgaggcggacactggaccgaaaggatagctggcggaggtcgatggccctcacggatgaagtcgaccaatggctgtctcgccgcgagacggacggcgtggccgagccctcggcagaaggcgagccttaccagagcccgcgccgctctatgatgggcgcgcgctcgttcgagctcgcgcgtcccgtcattgaccctgcagaccggatcgtcgacgagtccttggtgctgaatgaggcggccgtgtttgagcgctgcttccagcacgttgaggacttcgccacggaaggcctgcggaccctcatcttcggatatcgctatctggacgaggacgagtatcggcggtggaaggaaatatacctgcaagccaccacgagccttgtccagcggcaggagcgcatcgaggaggcggccgagctgatcgagcaggacttcgagctcgctggcgccacggcgatcgaagacaagctgcagcaaggggtgcccgagaccatcgacaagctccggcgcgccaatatcaagatctggatgttgaccggcgacaagcgcgagacggccatcaacattgcccactcggccaggatctgcaagcccttttccgaggtttatattctggacgtgaccgagggcgacctgcaagagcggctcgccatgaccctcaccgacgtctgccgcggcatgattccgcactcggtcgctgtcattgacgggcacacgctctcggtcgtcgaagacaacgcgacactccgcatgctgttcttcgacctggtagccagggtcgactcggtcatctgctgccgagcctcgccctcccagaaagccaacctcgtccggtgcatccgtcagcagtctccctcggcagtcaccctcgcgatcggcgacggtgccaacgacattgccatgatccaagcctcgcacgtaggcatcggcatctcgggccgcgaaggcttgcaggcagcccgcatctcggactactccatcgcccagttccgcttcctgcagcgcctgctcttcgtccacggccgctggctctacgtccgcagcggcaaatacatcctcggtaccttttggaaggaggtcgtcttctaccttctccaggcgcactatcagcggtacaacggctacacgggcacctccctcttcgagtccacctcgctgaccgtcttcaacaccatcttcacctccttgcccgtcatcgtcccgggcatctttgagcgcgacctgtccgccgagacgctgctcgctgtgccggagctatacagctttggccagcgctgccgcgggttcaatttcaagcagtacctcggctggatgttcatggccgtcgccgagtcggtcatcatcttcttcggcgtgtactacatctacgcggtcaagtcgcacgcgcccgtgccgacagatctgtaccccgtcgggacgctggcgttctcgctggccgtcgtcttcatcaacctcaagctcatgttcctcgaggtacacgaccggacggtggtgatactgggcgccatgtgcatctccatcctcgggtggtggctgtggaacatcctgctctccgcgctgtttcccggcaaggtcgggccgtacgtgatccgcgacgcgttcctggagaatttcggacgccaaggcctctggtggatcgtccacttcatcctcctctcggcgctcgtggtgttggagctgggcgttactgccgtgcgcaagtcgctgtggcccacggatcgggatctgatgcaggagatggagcatatcaagggcgtcaaggaggtgttcagggagcatgccgatggcggggaggccggggtctcggcgagccccggccccgaagaggccgacgaaggtggggaacggaccgcggacgcggcctcgctcaagacggtcacctccgcgtccgcctctgcggccccgcggcaggcgcccggcgaggtagcgaccggctggcaacggtgggaagggcacgcctcctcgcattacgcgcctgcgtccgccgtctcgcctggagctgggcggctgacgggagagtttgtgcgcccccggttcacgccgccggctgaagagcgggagaaccccctggagatcgcgggtgcgaagctcaaggagggcgcgcaacaggagtga

SEQ ID NO: 3667 - protein, 1614 aa, Myceliophthora thermophilia
MAGTGQRNATEASRDRPGNVELQQQNSSAPSDAGVARGNPQDGEPSPLTRSRPVPSLHLPRAGLRSYGYDETRSPRSRQPQSPLQRRTPELYTIQSHTLAPPAKEDGQDRRDGPSTASPRPRLGQPRISLTRPRQTFDEMRDSIKLPVDAEKSSATLSQLGWVGRQKRRKRGLGRIPWAKIQNAADRAYHRYIIEGLLRQKPIPPSQDGRHIPLKPGLVRRKPLKDERTGRPYVSNFIRSSRYTLWNFLPKQLFFQFSKLANFYFLVIGILQMIPNLSTTGTYTTIGPLLAFVALSMAKEGYDDYRRYRLDKLENRSLVCVLDPDGAAKSEPRSDGRASPGFFRRGKPVRDAGTQVTELESVGSSEDAESGQWTKIEWQDLRVGDIIRLHRDEDVPADIILLHATGPNGVAFIETMALDGETNLKTKQACPLLAKHCSSVAGMKDCEAEIVSEDPNIDLYNYEGRVTVNGETMPLTLSEVVYRGSTLRNTAYAIGLVINSGEECKIRMNANRNVRAKAPELQHAVNRIVIMLVFFVIILSVGCTVGYILWRRQYVGASDQPRAWYLQGGNVPLQQIFIAFVIAYNTLIPLSLYVSLEIVKLGQLFLLSDIEMYDPVTDTPMVANTTTILENLGQVSYVFSDKTGTLTENMMKFRKMSVAGTAWLHDMDLRTEADKKGKAPVVEKEGKGRSLNARTSTSQVESEMEEPLVDGRPPRTSTASRWKSSANPTQSQPELGNTEELLRYLANKPHSQFSRKARQFILCLALCHTCLPETGDDGAISFQAASPDELALVEAAKDLGYLLVDRAAQSMTLQVRTPNGPTITEKYEILDVIEFNSRRKRMSIVIRLPDGRRCIFTKGADSVILPRLKQKQLAFQTASAVERRASMRRSVEQEKALRRQSMQSYKRDSMTLRRTLDRKDSWRRSMALTDEVDQWLSRRETDGVAEPSAEGEPYQSPRRSMMGARSFELARPVIDPADRIVDESLVLNEAAVFERCFQHVEDFATEGLRTLIFGYRYLDEDEYRRWKEIYLQATTSLVQRQERIEEAAELIEQDFELAGATAIEDKLQQGVPETIDKLRRANIKIWMLTGDKRETAINIAHSARICKPFSEVYILDVTEGDLQERLAMTLTDVCRGMIPHSVAVIDGHTLSVVEDNATLRMLFFDLVARVDSVICCRASPSQKANLVRCIRQQSPSAVTLAIGDGANDIAMIQASHVGIGISGREGLQAARISDYSIAQFRFLQRLLFVHGRWLYVRSGKYILGTFWKEVVFYLLQAHYQRYNGYTGTSLFESTSLTVFNTIFTSLPVIVPGIFERDLSAETLLAVPELYSFGQRCRGFNFKQYLGWMFMAVAESVIIFFGVYYIYAVKSHAPVPTDLYPVGTLAFSLAVVFINLKLMFLEVHDRTVVILGAMCISILGWWLWNILLSALFPGKVGPYVIRDAFLENFGRQGLWWIVHFILLSALVVLELGVTAVRKSLWPTDRDLMQEMEHIKGVKEVFREHADGGEAGVSASPGPEEADEGGERTADAASLKTVTSASASAAPRQAPGEVATGWQRWEGHASSHYAPASAVSPGAGRLTGEFVRPRFTPPAEERENPLEIAGAKLKEGAQQE

SEQ ID NO: 3668 - DNA, 156 bp, Myceliophthora thermophilia
atggcccgcaccgatggcacgcgagcgccaccggcgccaccggcgccgtcggctggcctaggccacgtccgtcagaagcgaggcgcgtacgaaaagccctctggtccacccaagccggccccgaaccctgctcccgccggtcaagggtcggggtaa

SEQ ID NO: 3669 - protein, 51 aa, Myceliophthora thermophilia
MARTDGTRAPPAPPAPSAGLGHVRQKRGAYEKPSGPPKPAPNPAPAGQGSG

SEQ ID NO: 3670 - DNA, 1143 bp, Myceliophthora thermophilia
atggcaacggcgactgcatctccgggggctgatccggtgcacgagaaattcgctggtcccctcaaagtgccgctgccgttcccgacgcccgagagccgccccaaagagcggccggtgttgacgacggaacagcagcagaagtatgactggctgctccagcaggtcaaggggtggaccgaggttccctcgaccaagggcaaagccgggccgctgaccgacggcgagaagttctggttgaccaaggagtgcctccttcgctacctgcgcgcgaccaagtggcacgagaaggaggccgacaagcgtctgctcgagacgctcgcgtggaggagggagtacggcgtcgaggagctgacggccgagcacatctctcccgagaacgagaccgggaagcaggtcatcctcggctacgacaaggaggccagggtctgccactatctcaaccccggtcgccaaaacacggagccctcgccgcgccaggtgcaacacctggtgtacatggttgagcgggtcatcgacatcatgccgcccggacaggagacgctcgcgctgctcatcaacttcaagcagggcaagtcgcgctcaaacacagcgcccagtctcagcctggcccgcgaggtcctgcacatcctccagcaccactaccccgagcgcctcggcagggccctcatcatcaacatgccctggatcgtcaccggcttcttcaagctcatcacccccttcatcgaccccaacacgcgcgagaagctcaagttcaacgaggacatgagccagtacgtgccgaccgagcagatgtggtccgagttcagcacgggcgagctggaattcgactacgaccactcggtctactggcccgctctgcacaagctctgcaaggagaggcgcgaagcgcgctggcagcgctgggtcgccggagggcggcagctgggcgagtcggaggactatctggcggggggtaccgagacgggcgtcgcacagcaggccactggcgcgacggagaacacagccgaggacacagagaagacggaggcagtcccggatgccgaacaggtcccgagcgcgtccaccgaggagaaagctgccgagaaggttaccgagaatgtggttgagcccaccacggcgcaaaacgctgttgcttcggcctga

SEQ ID NO: 3671 - protein, 380 aa, Myceliophthora thermophilia
MATATASPGADPVHEKFAGPLKVPLPFPTPESRPKERPVLTTEQQQKYDWLLQQVKGWTEVPSTKGKAGPLTDGEKFWLTKECLLRYLRATKWHEKEADKRLLETLAWRREYGVEELTAEHISPENETGKQVILGYDKEARVCHYLNPGRQNTEPSPRQVQHLVYMVERVIDIMPPGQETLALLINFKQGKSRSNTAPSLSLAREVLHILQHHYPERLGRALIINMPWIVTGFFKLITPFIDPNTREKLKFNEDMSQYVPTEQMWSEFSTGELEFDYDHSVYWPALHKLCKERREARWQRWVAGGRQLGESEDYLAGGTETGVAQQATGATENTAEDTEKTEAVPDAEQVPSASTEEKAAEKVTENVVEPTTAQNAVASA

SEQ ID NO: 3672 - DNA, 1917 bp, Myceliophthora thermophilia
atggccgacgagatagtggcagaactaaacgaacgattcggctcgggaaacaaagatctcgaggccgatcaagtcgccgagctcaaatccatcatgcgcctgcaccagttgtcggtccaggacctgttcttcaaatgggagtcgtacggcatgaagatgggcatggacgacttccaaccctccatcgacaacctccgtgcattcaagcagaacctgcaagacgagctcgcgcgcagcagccgatcgcagcaggcacacattaagaccgagaggcgagctggtgcaaccccgcgggtgggcaagggtggcgatgtgtttgggatgctggatggcctggcaaccccggcccaggggcggccaaacggtgctgtcaagaagacgcccgcaacctcgcgggtcaaggcagagccgacaagctcgccattgaaggtggaagaccaggcgaatgcgacaggcgaagtgccaccatcatcatcatttagcgacagacccaacgcgggagaagtgctagagattctcaatgagcagctcgaggctgccgaacccccaatctcccctttccccgaatcccgcatcaagctcgccgcgacgtcagaccagaagaagctcggatacaaggggttggccatgaaactctcagaggcttccgagatcctagatgtccggatagaggagttcgcggccgaggttatgcgacaccacaagctggaggaattggcatttggaagtcccgccagccagagcactgccgagatcatcgcggttggccgtatcgcatcagactcgctggaagggaagctgaatgccgcatcgctggtactggagacctcgaggcggatgggcaacggtctgcgagtgcccctgaacctcggcaagctgaaggcgtaccagttcttcccaggccagatcgtcgccctcaggggcatcaactcctccggccgggaatttaccgttcacgaggtcctcgaaatccctctcctcccaagcgccgcctctcctcccgacgccttggccagccacctggcgcgtctccgcggggggccggacgcgatggactcggacgagaccccaaccctccccctcaccgtcctgttcgcctcgggcccttacacggccgacgacaacctcgacttcgagcccctccacaccctgtgtagcgaggcggccgacaccttcgtcgacgccgtcgtgctgaccgggccattcatcgacgtggagcacccgctcatcgccacgggcgacttcgacctcccggccgaggcctcgtacgacccggacgcggctaccatgacgaccgtgttcaagtacctgatctcgcccgccatcaaccggctcgtcgcggccaacccgtccgtcaccgtcatcctggtcccctcggtgcgcgacgtgctggacaagcacgtctcgtggccgcaggacgccttcccgcgccgcgagctgggcctgcacaagagcgtcaagatcgtcggcaatcccatgacgctccggatgaacgagatggtgctgggcgtcagcagccaggacgccctgtgggagctgcgcagcgaggagctcgtgggcggcgcccgcgccgccgacgccctctcgcgtgtcagccgctacctgactggcgcggcagacgccgcgggaggcggcctgcccccgggcgccatgctcgacgtcagctatctgaagctgggcgagatgatcgacgtgcggccggacgtcttggtcgtgccgagcgcgctgccgccgtttgcaaaggttgtggagagcgtactggtcattaacccgggttatttatcgaagcggaaagctgccggtacctacgccaagatgacgctatacccgccatccccggaggatatggcagggaatgggggactgactgcacacaagatatatgaacgggcaagggtggaaataacgaggatttga

SEQ ID NO: 3673 - protein, 638 aa, Myceliophthora thermophilia
MADEIVAELNERFGSGNKDLEADQVAELKSIMRLHQLSVQDLFFKWESYGMKMGMDDFQPSIDNLRAFKQNLQDELARSSRSQQAHIKTERRAGATPRVGKGGDVFGMLDGLATPAQGRPNGAVKKTPATSRVKAEPTSSPLKVEDQANATGEVPPSSSFSDRPNAGEVLEILNEQLEAAEPPISPFPESRIKLAATSDQKKLGYKGLAMKLSEASEILDVRIEEFAAEVMRHHKLEELAFGSPASQSTAEIIAVGRIASDSLEGKLNAASLVLETSRRMGNGLRVPLNLGKLKAYQFFPGQIVALRGINSSGREFTVHEVLEIPLLPSAASPPDALASHLARLRGGPDAMDSDETPTLPLTVLFASGPYTADDNLDFEPLHTLCSEAADTFVDAVVLTGPFIDVEHPLIATGDFDLPAEASYDPDAATMTTVFKYLISPAINRLVAANPSVTVILVPSVRDVLDKHVSWPQDAFPRRELGLHKSVKIVGNPMTLRMNEMVLGVSSQDALWELRSEELVGGARAADALSRVSRYLTGAADAAGGGLPPGAMLDVSYLKLGEMIDVRPDVLVVPSALPPFAKVVESVLVINPGYLSKRKAAGTYAKMTLYPPSPEDMAGNGGLTAHKIYERARVEITRI

SEQ ID NO: 3674 - DNA, 249 bp, Myceliophthora thermophilia
atggtctcgcccgtgtcgtttggcgatgccgtcgcgatggctaagatcgcgttgcgcatcgccaacgccttcacccagggccaaaagtcagccccggccgagttccgagaggtcgaaagccaactatatgccctcgccgcatcactatcggcgttcagggacgtgtgcggcactgacctggccggtctcaccattgacccatccaagctgcccgctgggttccgcccaccgccgaaaagttggacctga

SEQ ID NO: 3675 - protein, 82 aa, Myceliophthora thermophilia
MVSPVSFGDAVAMAKIALRIANAFTQGQKSAPAEFREVESQLYALAASLSAFRDVCGTDLAGLTIDPSKLPAGFRPPPKSWT

SEQ ID NO: 3676 - DNA, 1818 bp, Myceliophthora thermophilia
atgccgactatcaccgtcgacaagtatgctctcttcgaagagctcggcgagcagttcaccgaggagggcttcgaacaactatgctttgactttggtatagagctggacaaggataccgagaatgacccctcgcgccccaaagatcagccccccgagctcgcaatcgaggtccccgctaaccggtacgacatgctgtgcttcgagggcatcgcgatacacctaaacatcttcaggggcaaacaaccgacgccaaactggagacttgtcgatatccccgaggacaagatgcagaccctcaccatctcggagagcacggcccaggttcgcccgtacgctgcggctgcgatcctccgcaacatcacgttcacgcaggcctcgtacgactctttcattagtcttcaggacaagcttcaccagaatttggcgaggcagcgtaccctggtcgcgattgggacacacgatctcgacaccatcaagggaccgttcacatacgaggccctgcccccgaaggacatcaattttgtcccgctcaatcaaaccaagaagatcaacggcgaagagttgatgagcttctacgagaccgacaggcatcttggcagatacctccacatcatccgcgacaagcccgtgtacccagtaattcttgatgcggacaggaacgtctgctcgcttccacccattatcaacagcgagcgctccaagatcacgctgaacaccaagaatgtcttcatcgacatgacggcgacggaccagaccaaactcgacattgtctgcaacatcatggtgaccatgttctccaagtactgcgccgagcccttcacgatcgagccggtcaaggtcatttcagaccataacggcactacccgcatcacgcctagcttaactacacggacgatggatgttgaggctgattatctcaatcagctttgcggactcgaagagtcaccagagtcgatctgcaagctcctcagcaagatggcgtacacggcgaagccatctccagaccccaagctgatcagcgttgcggtcccaccgacaagggcggatgtcctgcacccatgcgatgtgatggaggatctcgcaattgcgtacggtttcaatgatcttccgcggacgtcgccaaacaggtcggtcaccattggcaagccgttgaagatcaacaagctcagtgatatcgtgcgtcacgagtccgcaatggctggttgggccgaggttatgcccctagttctctgctcgcacgaggagaacttcgagtggttgaaccgcaaagatgacgggaaaacggcagtcaaacttgccaacccgaagacggcggagtatcaaatcgcccgcacgtctctgctccctggcctgctcaaaaccctgggagagaacaaggcgatgcgccttccgctacagatcttcgaggtgtccgatgtcgtcttcaaggacgagacttcggaacgacgggcgaggaacgagcgccactgggcggcggcctactatggcaagaccagcggcttcgagatcgtccacggcctcctagacagggtcatgacaatgttgcgggtcgcatttgttacccatgaggagggcctcgagggcaagaccattgacttcaaggtgaaagagaacccgagcgagcgggacggatatttcattaaggagatcgatgagcccaccttcttcaatgggcgtgctgccgccatatacgtgcggcttgggggcaagctgcaacgtatcggcgaactcggtgtcttgcatcctaccgtactggagaagttcgatctgaaatacccggtgagcacactagagctcaaccttgaggttttcctttga

SEQ ID NO: 3677 - protein, 605 aa, Myceliophthora thermophilia
MPTITVDKYALFEELGEQFTEEGFEQLCFDFGIELDKDTENDPSRPKDQPPELAIEVPANRYDMLCFEGIAIHLNIFRGKQPTPNWRLVDIPEDKMQTLTISESTAQVRPYAAAAILRNITFTQASYDSFISLQDKLHQNLARQRTLVAIGTHDLDTIKGPFTYEALPPKDINFVPLNQTKKINGEELMSFYETDRHLGRYLHIIRDKPVYPVILDADRNVCSLPPIINSERSKITLNTKNVFIDMTATDQTKLDIVCNIMVTMFSKYCAEPFTIEPVKVISDHNGTTRITPSLTTRTMDVEADYLNQLCGLEESPESICKLLSKMAYTAKPSPDPKLISVAVPPTRADVLHPCDVMEDLAIAYGFNDLPRTSPNRSVTIGKPLKINKLSDIVRHESAMAGWAEVMPLVLCSHEENFEWLNRKDDGKTAVKLANPKTAEYQIARTSLLPGLLKTLGENKAMRLPLQIFEVSDVVFKDETSERRARNERHWAAAYYGKTSGFEIVHGLLDRVMTMLRVAFVTHEEGLEGKTIDFKVKENPSERDGYFIKEIDEPTFFNGRAAAIYVRLGGKLQRIGELGVLHPTVLEKFDLKYPVSTLELNLEVFL

SEQ ID NO: 3678 - DNA, 1845 bp, Myceliophthora thermophilia
atgccgtcaccaaccacggcaggacccccaaggtccgccgagatcactgatgcggaccacggacggccaggcacgagcgaggcaccggcctcgggcgtcccccacgcacacaaccttgccgccggtcacgaaggctatttcagcagtgatgacaccacccgagccccatcgacggcaggagacgagaccgagaaggcgtgggaggcggccacagcaaccggcgagaatgagaagaaggatgtcagggcgaccggcgatagcgttcgggacgagcccgtcgggcaggaggacggcggggaggaggagatggagtatcccacagggctaccgttcgtcttcatcatcattgccttggtgctcagcatcttcctggtttctcttgacatgacaatcgtggcgacggccatccccaagataaccgacgagttccatggcctagaagacgtcgcctggtatagttctgccttcttcatgacggtcggcggcttccagtcgacatggggcaaggtgtttaagtacttccctctcaagatcagcttcttcatctccatctttgtcttcgaactcgggagcctgatctgcggcgtggcgccaaactcgacggcgctgatcgtcggacgcgccatcgccggggttggcgctgccggcatcggctccggggcctatacgatcatcgccttcgtcgcaccgcccaagaagcggcccgtctacaccggcatcgtgggcacctcgtacggcatcgccgccgtggtcggacccctgatcggcggtgccttttccgaccacgtcacttggaggtggtgcttctacatcaacctccccatcggcggcgtctccctcgccctcatcttcttcttcttcaccacacccaagggagccaagccggtcgaggcgagcctgaaggagaagattctccagacggacccgctcggcacagcgctcgtcatgggcggcgtcatctcgtacatcctggcgctccaatacggcggccagacgaaggcttgggacagcagcacggtcattgggctgatcgtcggctgcgtcgtcatcttcatcgtcttcggcttctgggagttctacaacggcgagcgttccatgatcgtcccgcgcctcttcttccaccgccagatctgggtctcgtccgtcttcgccttcttcttcgccggctcctacttcatcatcatctactacctgcccatctacttccagagcgtcgacaacgcgagcccgaccgagtcgggcgtgcgcaacctgccgctgatcatagccgtcaccatcgcgaccgtgctctcgggcgtggccatcacggccacgggcatcgccgccccggtggccgtcggcggctcggccgtcggcaccgtcgctgccggcctgctctacacgctcgacatcggcaccggcgccggcaagtggatcggctaccagatcctcgccggcctcgcatggggtgctgccttccaggtgcccatcatcaccggccaagcctcggcggcgccccacgacatgtcgtctgtcaccgccatcattctattcttccagatagtcggcggcgccttcttggtctcggccgctcagtcggccttcgtcaacaaaatggtccacgagctggcaacgtcggcgccctcgctcgacccgctcatcgtcctgggcacgggggcgacccagatccgcgacgtgttccccgccgacgcggtcccgggcatcgtggtggcctacatgcagggcatcaagacggccctggcgctggttatcggcacgaccggagtcgctttcttggtcagcctgttcagcaacttcaagaggctgaataccgaagcgctcaagacgggcggcgcggcggcgtaa

SEQ ID NO: 3679 - protein, 614 aa, Myceliophthora thermophilia
MPSPTTAGPPRSAEITDADHGRPGTSEAPASGVPHAHNLAAGHEGYFSSDDTTRAPSTAGDETEKAWEAATATGENEKKDVRATGDSVRDEPVGQEDGGEEEMEYPTGLPFVFIIIALVLSIFLVSLDMTIVATAIPKITDEFHGLEDVAWYSSAFFMTVGGFQSTWGKVFKYFPLKISFFISIFVFELGSLICGVAPNSTALIVGRAIAGVGAAGIGSGAYTIIAFVAPPKKRPVYTGIVGTSYGIAAVVGPLIGGAFSDHVTWRWCFYINLPIGGVSLALIFFFFTTPKGAKPVEASLKEKILQTDPLGTALVMGGVISYILALQYGGQTKAWDSSTVIGLIVGCVVIFIVFGFWEFYNGERSMIVPRLFFHRQIWVSSVFAFFFAGSYFIIIYYLPIYFQSVDNASPTESGVRNLPLIIAVTIATVLSGVAITATGIAAPVAVGGSAVGTVAAGLLYTLDIGTGAGKWIGYQILAGLAWGAAFQVPIITGQASAAPHDMSSVTAIILFFQIVGGAFLVSAAQSAFVNKMVHELATSAPSLDPLIVLGTGATQIRDVFPADAVPGIVVAYMQGIKTALALVIGTTGVAFLVSLFSNFKRLNTEALKTGGAAA

SEQ ID NO: 3680 - DNA, 2211 bp, Myceliophthora thermophilia
atggccgccgaccacccaaaggcggggatatacagcgctacgtatagcggtattcctgtctacgaataccagtttggtccggaccttaaggagcatgtgatgcgccgccgagaagataattggatcaatgcaacgcacattctcaaggccgccggcttcgacaagcccgcccggacacgcattcttgagcgcgacgtgcaaaaagacattcacgagaagatccagggaggttacgggaaataccaaggaacgtggatcccgctcgagcacggcgaggcgctggcccagcgcaacaacgtctacgagcggctgcggcccatcttcgaatttcagcccggcaatgagagcccgccgcccgcgccgagacatgccagcaagccgaaggtcccgaaggcccggcctgctgttccgaaatggggcagtaagtcgcagaacaagaacgcaagcctctctcaagccgccgtcttctcacgccatcaacaaggtgctgctttccaggaagactacgacaacgcgagccagctaaacgaggatgacaccccggacaacctgacggttgcctcggcgtcctacatggccgaggacgaccgctacgatatgtcacaatactcgaccggtcaccggaagcgcaagcgggaggagatgctgcaggacatgacggaacagcaacacgccatgtacggggacgaattgttagactacttcctgctctctagaaacgagcagcctgcgattcgccccgatcccccgacaaactttcaacccgactggcccatcgacacagaacagcatactgcgctgcactgggcgtccgcaatgggcgatgtcgaagtgatcaagcagctgaagcggttcagcgccaacctcgcctcgcgaaacatacggggggaaacccccttcatgcggtccgtcaacttcacaaactgctacgagaaacagacctttcccatggtcatgaaggagctgttcagcaccgtagacgcgcgggacgcgtccggatgtaccgtcatccaccatgctgccgtcatgaagagcgggcgtgtcacgagtcactcatgctcgcgctactatctcgagaatatcctcaacaagctgcaagagacgcggtccgcggacgaactgcagcgattgttggatgctcaagacaatgacggcaacactgccctgcacctggcggcaatgcgggatgcccgcaagtgcattcgggcgctgctcggccggggagcatcaaccgacatccccaataaccagggcgtcagggctgaggacctgatcagggagctcaatgcttccaagtctaaagcagctcggggggcaccccagcgatcgtctagtcccttcgcccccgactcccagcggcataatgcgttccgcgacgccgtggccgactcggacggcaagagacaggccagtttccggagcgaggccgcaaataccgttcagtcccggatcacccctcttgtcctgcagaagttccaagacctcgcccagagttacgagaacgagatcgacgagaaggaggaggcagagaaggaggccaaacgtattctcatcaacacccaggccgagctggcaaacttgagggcctcggtcgccgaccttgaatctcacctagaagcggacgaggcagccgcgaagacggaagccgaagccgccgaagcggctaagcaggtgctcgcctacctaacgcatcaaaatcgccttgccctacaagaggccgtcaacaaagagctggccaccgttaacggcgacagcagcaaacctgccgacctgcccaacggccagcctgcggacacatccggcggccctcagccggacggcgccaccgcagacaacggcacgaagaaagacccagcagacgatgatccgcaggaacgtctccgcctcgcgaccgagctgcgggccctccttcaggaacagcgccgcgccgaagcagagtacgtcgaagcccgcggcctgaccggcacaggcgaaaagatcgacaagtacctgcaccttctcaaatcgtgcctgccgcctgaggatcacgagatgctggatgagaatttggaggacatgatcaagttgatggaggacgaagcagatgtcacgtcggccggggcggcgcccgcaccaagtgaggccgccgaaggggtgtcctcgttgcccttgccggggcaggcgcagcaggtgtcggtggggttgggtgtggaggtgtcgtctctgtcatga

SEQ ID NO: 3681 - protein, 736 aa, Myceliophthora thermophilia
MAADHPKAGIYSATYSGIPVYEYQFGPDLKEHVMRRREDNWINATHILKAAGFDKPARTRILERDVQKDIHEKIQGGYGKYQGTWIPLEHGEALAQRNNVYERLRPIFEFQPGNESPPPAPRHASKPKVPKARPAVPKWGSKSQNKNASLSQAAVFSRHQQGAAFQEDYDNASQLNEDDTPDNLTVASASYMAEDDRYDMSQYSTGHRKRKREEMLQDMTEQQHAMYGDELLDYFLLSRNEQPAIRPDPPTNFQPDWPIDTEQHTALHWASAMGDVEVIKQLKRFSANLASRNIRGETPFMRSVNFTNCYEKQTFPMVMKELFSTVDARDASGCTVIHHAAVMKSGRVTSHSCSRYYLENILNKLQETRSADELQRLLDAQDNDGNTALHLAAMRDARKCIRALLGRGASTDIPNNQGVRAEDLIRELNASKSKAARGAPQRSSSPFAPDSQRHNAFRDAVADSDGKRQASFRSEAANTVQSRITPLVLQKFQDLAQSYENEIDEKEEAEKEAKRILINTQAELANLRASVADLESHLEADEAAAKTEAEAAEAAKQVLAYLTHQNRLALQEAVNKELATVNGDSSKPADLPNGQPADTSGGPQPDGATADNGTKKDPADDDPQERLRLATELRALLQEQRRAEAEYVEARGLTGTGEKIDKYLHLLKSCLPPEDHEMLDENLEDMIKLMEDEADVTSAGAAPAPSEAAEGVSSLPLPGQAQQVSVGLGVEVSSLS

SEQ ID NO: 3682 - DNA, 219 bp, Myceliophthora thermophilia
atgcatctcatgtatcttcctgaggctaacggctccggccggcgctacaccctgaagaaagtcatggacgggaaggtgaccaagtcggcgcaccctgcgcgtttctcgcccgatgacaagtggtcgcggcaccggattgctatttgcaagaggttcgcggtgctcctggctcagaagacgttcaggacaaggagcgtcgacaagctcgcccaactttaa

SEQ ID NO: 3683 - protein, 72 aa, Myceliophthora thermophilia
MHLMYLPEANGSGRRYTLKKVMDGKVTKSAHPARFSPDDKWSRHRIAICKRFAVLLAQKTFRTRSVDKLAQL

SEQ ID NO: 3684 - DNA, 1263 bp, Myceliophthora thermophilia
atggatcaacaagcgagcgaatctgtagcgcaggcgcaaagcgagagcccaggcccgagcccgacccagaaccccgcccccgccacggccagtccttccgagaccgcgccgacaccagcatcaacgcacaccacaacgtcttccaagccggtccattcactcgtcatagacgcgaatgcaatcattagaaacgacccaactgtctccacattgcttgctcaagccgagcagctttatactatccctgctgtggtctcagagatccgtgatgaggcaacaagatctcgctttcaaacaactctgtccccattcctcaagcttcggagcccccgaccggaatcagtccagttcatcaccagttttgcgcgaaaaactggcgatctccaggttctgtcaaagcccgatattcagcttctcgcccttacatacgaattggaggtggagagaaatggcggtgactggcggctcaggcgagaccctaaccagcaaggcgtaaatgggaagccaccggcaaaatctggagatgaagtcgataaggattccaagaccgaggcagaagaaaagggcagcgccgactccccggccaccgcttgcgaagtggctaaggagccagtagagactttgccaagcgccgtggagggggatgctcaggtcaacccaggaataaacgagtcagttgctgagcaactccaaaatctcagcttgaacaagccggcgaccgaggaaaacgtcgtcgaagaagaggacttgacagaggaagaggacgatggagagggggaatggattaccccgagtaacatcaagaagtaccaggctcgggaaaacgcccaaattgagccccagccgttacagagtgtgcttcaggccgcgctgatcacaggcgatatggctatgcggaacgtggctctgaggataaacctaaacaccgacgctaacggaaacttcactctctacctcaagaagaacttccagtacaacaaccggggcaatgtgtacagcatccccaagcccacgcacggctccgcaagcgggaaaggaacccatatcaagggcggcggtaagaacgggtgggggagggagctgattctagctgaggatcagaaggagtacaagaagaagctggaagaggagcgccgtatgaaaactcgcgatctcatggaccaggactacctgcccagcatcctgagcggcaacagaacttcgggaggaggaaggatcagagtcggcgcaggtcgcaatgtcaacgcgaaaaagaggaggtga

SEQ ID NO: 3685 - protein, 420 aa, Myceliophthora thermophilia
MDQQASESVAQAQSESPGPSPTQNPAPATASPSETAPTPASTHTTTSSKPVHSLVIDANAIIRNDPTVSTLLAQAEQLYTIPAVVSEIRDEATRSRFQTTLSPFLKLRSPRPESVQFITSFARKTGDLQVLSKPDIQLLALTYELEVERNGGDWRLRRDPNQQGVNGKPPAKSGDEVDKDSKTEAEEKGSADSPATACEVAKEPVETLPSAVEGDAQVNPGINESVAEQLQNLSLNKPATEENVVEEEDLTEEEDDGEGEWITPSNIKKYQARENAQIEPQPLQSVLQAALITGDMAMRNVALRINLNTDANGNFTLYLKKNFQYNNRGNVYSIPKPTHGSASGKGTHIKGGGKNGWGRELILAEDQKEYKKKLEEERRMKTRDLMDQDYLPSILSGNRTSGGGRIRVGAGRNVNAKKRR

SEQ ID NO: 3686 - DNA, 1017 bp, Myceliophthora thermophilia
atggctgtttcgtattaccaagccgggaacgactggagatgttcatttcacccttcatcttgtcagactgagcgagaaccatcctacgaagcaatatcttaccactggggtgaccagaatgacacacgggtcgtgtactgcgagggcaagccgctgcgtgtcaccgtcagtctctacactggcctcaaaaggctccggcggcaagatatcgtcagggtcttctgggcagatgcagtgtgtatcaaccagaaggacacactggagaagaacgcgcagctcccgctggtgagccgcatctactcccaaccgagccgtgttctcgtcttgttgggcgagaacacttccggtatcgaggggctcgaggagtgcatcaagggggcaatggatatccttccaccagaacattacgaatttgagacaatatacccaatatctgaaaagaatatttctcgaatcttttggcagcggctgcgagcagaagggaagccaaacgttcttgattataactggcgtcgcatgaacagtcttctctgtcggccatggtttgacagaaggtggatcattcaagaggtaacgctcgcagacgacacggtgccccgactcgccatttgcgggcatgtcgaattctcgtggaacgacctggcttccgtggcctgcaggattgcagcttacggaattcctcccctgctcgctgggttgtcgaccagggagggcgatctgtttgtctgcatcgcgggggccgaggttccctacctgctgcggcccgttgctgggaggccagggatttatacactggtcggcgacgccttcctcttaggagtgatgcagggcgaagcctggtcggatgcacggtatgagacggtcgacatcacgatcgggtggtcagaacggaagactgaggtggcactggcccctgcagcatccgagagagcatctctcaagtccctaattaagttgcgctataagtgcgccaccttgcccatgactacggattacttcccaaccgaaattaaataa

SEQ ID NO: 3687 - protein, 338 aa, Myceliophthora thermophilia
MAVSYYQAGNDWRCSFHPSSCQTEREPSYEAISYHWGDQNDTRVVYCEGKPLRVTVSLYTGLKRLRRQDIVRVFWADAVCINQKDTLEKNAQLPLVSRIYSQPSRVLVLLGENTSGIEGLEECIKGAMDILPPEHYEFETIYPISEKNISRIFWQRLRAEGKPNVLDYNWRRMNSLLCRPWFDRRWIIQEVTLADDTVPRLAICGHVEFSWNDLASVACRIAAYGIPPLLAGLSTREGDLFVCIAGAEVPYLLRPVAGRPGIYTLVGDAFLLGVMQGEAWSDARYETVDITIGWSERKTEVALAPAASERASLKSLIKLRYKCATLPMTTDYFPTEIK

SEQ ID NO: 3688 - DNA, 1557 bp, Myceliophthora thermophilia
atgggcggcggcggcggcggagctagcccggacaatctgatccatcgcatggcgatggaggatccggtgccctggtacaagaaaccgaacctgcgcaggatgtacttcttattgttcccctgtgtcatcggcatcgagatgacctctggtttcgactcgcagatcatcaactcggcccaacttctgccggcgtggaaagagtattttggacaccccagcggggcatacaatggcatcctcgcttctgccctcccgcttggctctgtcatcggtctccccttcatcccgctcgtcaacgacatctggggccgccgatggtgcatcatgtttggctcctgcatcatgatcattggcaccattattcagggcctcgcgatcaacggccccatgtacatcatggcgcgcggcattatcggtttcggcctgccctacgccatcgtcgcgggctcctgcctgatcggcgagctgggttaccccaaggaacggccgatcctgacgtcgctcttcaacgcgtgctactttatcggagccatcgtggcggcggggacgacgtttgggacgcagcagatcaacaacgactggtcgtggcggatcccgtcgttcctgcagatggcgccgtcgctgctgcaggtcacgtttgtcttcttcctgcccgagtcgccgcgcttcctgctgagcaaggaccggatcgaggaggccgaggaggtgctggtggcgtaccacgccgagggcaacgccgagtccgagttcgtcaaggccgagatcgccgagatcaaggcaacgctgcagatcgagctcgagaactcgaagcggtcgtggctggacctggtgcgcactgcgggcatgcggcggcgcctcatcatcggctcgctgctcggcctgttcacgcagctgtcgggcaacgtggtcatctcgtacttcctgggtgacgtgctcaagctcatcggctacacggacccgactttccaggcgcagtacaacctcggcaaccagtgctggtcgctggtgtgcggcgtgagcgcggccctggtggtgatgcgcttccggaggcggaccatgtacctgacgggcatcctgtccatcctggccgtatacgtcgcctggactacgtgcacggccatcttcatcgtcgaccggtcccaggtggcggccaagctatcgcttttctggatctacgcctacagcccggcgtacaacctgtgcttcaacgccctgacctacacctacctcatcgagatcttcccgttcgcccagcgcgcccgcggtatcgccatcttccaattctggggcaaggcggcccaatttttcggcaccaacgtcaaccccatcggcacccaggctatcggctggaagttcctgctcgtgtattgctgctggatctttgtcgaggcagtcctgatctggttcctttggcccgagacgtccggccgctctctcgaggagctcgccttcctcttcgaggccggcgagaatgctcgccgtcaagacaagttaattaccgaggtgctgcacgccgaagagctgaacgaaaagacgagccacgtgaaggatgcttaa

SEQ ID NO: 3689 - protein, 518 aa, Myceliophthora thermophilia
MGGGGGGASPDNLIHRMAMEDPVPWYKKPNLRRMYFLLFPCVIGIEMTSGFDSQIINSAQLLPAWKEYFGHPSGAYNGILASALPLGSVIGLPFIPLVNDIWGRRWCIMFGSCIMIIGTIIQGLAINGPMYIMARGIIGFGLPYAIVAGSCLIGELGYPKERPILTSLFNACYFIGAIVAAGTTFGTQQINNDWSWRIPSFLQMAPSLLQVTFVFFLPESPRFLLSKDRIEEAEEVLVAYHAEGNAESEFVKAEIAEIKATLQIELENSKRSWLDLVRTAGMRRRLIIGSLLGLFTQLSGNVVISYFLGDVLKLIGYTDPTFQAQYNLGNQCWSLVCGVSAALVVMRFRRRTMYLTGILSILAVYVAWTTCTAIFIVDRSQVAAKLSLFWIYAYSPAYNLCFNALTYTYLIEIFPFAQRARGIAIFQFWGKAAQFFGTNVNPIGTQAIGWKFLLVYCCWIFVEAVLIWFLWPETSGRSLEELAFLFEAGENARRQDKLITEVLHAEELNEKTSHVKDA

SEQ ID NO: 3690 - DNA, 708 bp, Myceliophthora thermophilia
atggccgataacgagactccgcgaaacggcgtcgacgcccttatcagcagagacgaagggcggaggtactgggaaggggtagacgccacggtcaacggcatgctcggcggctttccccacgtatcaagggtcgatatccggggctcgcgaaacttcctggccaagctgggaatcggatcgaagcccggtcagcgcatcgccgcgaccgcgctcgagggaggggccgggatcgggagggtcaccaagggtctccttctcgatggcgtcgcccagcaggtcgatgttatcgagcccattgccaagttcacgagccagctccagggcaaaccgggcgtgaggagtatattcaacatggggctcgaagactggcagccgaccgagggtgtgcagtacgacctgatctgggtccagtggtgtgtaggccacttgactgatgagcagctggcccaattcctcgtcaggtgtacatcggcactcaaccccgacggaggcgtcatagtcgtaaaggagaacaactcctccagcgggcgagacgagtttgacaatgtcgacagcagcgtgacgagagatgacggtacattccggcgcatattcaccgaggcgggccttcaactcatccagaccgaattgcagaagggcctgaatgtcgccggtgcaagtcttttgccggtcaggatgtacgcactaaagcccgctcaatcaaaatga

SEQ ID NO: 3691 - protein, 235 aa, Myceliophthora thermophilia
MADNETPRNGVDALISRDEGRRYWEGVDATVNGMLGGFPHVSRVDIRGSRNFLAKLGIGSKPGQRIAATALEGGAGIGRVTKGLLLDGVAQQVDVIEPIAKFTSQLQGKPGVRSIFNMGLEDWQPTEGVQYDLIWVQWCVGHLTDEQLAQFLVRCTSALNPDGGVIVVKENNSSSGRDEFDNVDSSVTRDDGTFRRIFTEAGLQLIQTELQKGLNVAGASLLPVRMYALKPAQSK

SEQ ID NO: 3692 - DNA, 660 bp, Myceliophthora thermophilia
atggcgcctcagttaagcgaagacgaaattgatgaccttctatatgcagctcgaacgggcgacaaggatgagctcacaggtctgctgtcgtcgctggccgagcgggaaaaggtgactcccgccaagcttctcataagcgcaaaggatgaggggaagtcgacatgccttcacatggccgctgggaatggccatgccgacatcgtcgccctcctgctcagctatttcccgccagcagcagcggcggcggcggcggaggatgaggagaagaggaagcagaagcaggcctttctggacgcgcccaacgagtacggtaacacgggcctgcactgggcggcgctgggcgggcacctggcggtcgtgaagctgctggtcgagcacggggcgtcggtcgcgctggccaacgataagaactacgtgccgctggacttggccagcttcggggacaagtttgacgtggtcgactacttcctctcccagagcggcgggatcgaaggggagaacgccgcggtgggcgggctggaaggcgacatggaaggggtgtcggtggaaggaggggagggggaggaacaagttggagtggaaggggaagagaagggaaaggggaaagggaaagggaaagaaactgacaaggaggtggaggaaggagggaagtcaggttaa

SEQ ID NO: 3693 - protein, 219 aa, Myceliophthora thermophilia
MAPQLSEDEIDDLLYAARTGDKDELTGLLSSLAEREKVTPAKLLISAKDEGKSTCLHMAAGNGHADIVALLLSYFPPAAAAAAAEDEEKRKQKQAFLDAPNEYGNTGLHWAALGGHLAVVKLLVEHGASVALANDKNYVPLDLASFGDKFDVVDYFLSQSGGIEGENAAVGGLEGDMEGVSVEGGEGEEQVGVEGEEKGKGKGKGKETDKEVEEGGKSG

SEQ ID NO: 3694 - DNA, 1332 bp, Myceliophthora thermophilia
atgctctcggcatcaagggctcaacagaaacccgccaacaacacccacatcccgcacccccattccagacaaccctcgtcggtatcgtttgccgcggaatccgatttagtacagattcctttcgggtcccgaacctccgcgctctcgcggattgaggaattgctggagtcgatcgtagacgcaatcacccatgacaacgagctcaccatcccttatgaaactgttcgctcttctcaaaacggggccgaatttgagccccaatttggatccgatcgcgtggcaaatgtcgtcagatttcctgggcggacaatacaagaggtcaaaaagtttgaggccctcttccgcatcattgagatgtcacacgaggccctcctgtcaggaaagttgattacaaagaggaatatttactaccaaaaccccgagctattcaaatcgcaaagcgcggtcgatgacatggttgataacctcgcctttactttaggtgttggtagggaagatttgaacattgtggcaacagccaagggcctcatttccgggccgattgacctcatactccgtgacggatccatccacagctgcgattcagcaagtgatacggggatactgttaccatcggtcaacctgataaccaagatcaactttggcctcatacgatgggtcttagttattgaaaaagaggcaacatttcggacgctggctgctgcaaagtactcccgcacgtctcgcgcaggacaagggattcttctgacagcaaagggatatccagatctcgcaactaggcgtttcctatttcttcttcatagcgttcgaccagagctcagtttattcgccctggttgacttcgatccccatgggattgccattatgcggacgtacaagcatgggagccagcgcctggagcatgagcagaacgcagcagtaccgtgtctacagtggcttggccttcacagtggggacgttataatgaacttgcccgcaaagtacccttcagcatgcgacagcatccagaatcaggacagccaacagcctgcgagtcaagaatctgcagagtacttaatctccgattcgcgaagagagaaaccgatgaagagagccagacatagcaaagagcaggaatcaagcgaatcaatcatccccctaaccgaacgagacaggaagaaagcagtccaagtaatgcgtgagatctggaacccggggaacatgaccgaggagggggccgaccaggtgagggaattgcagcgcatgttgatgttgaatgtcaaggccgaaatacaagccgtggacagctacggcgacatcgctaattggttggacgggaagctgagcgtgtaa

SEQ ID NO: 3695 - protein, 443 aa, Myceliophthora thermophilia
MLSASRAQQKPANNTHIPHPHSRQPSSVSFAAESDLVQIPFGSRTSALSRIEELLESIVDAITHDNELTIPYETVRSSQNGAEFEPQFGSDRVANVVRFPGRTIQEVKKFEALFRIIEMSHEALLSGKLITKRNIYYQNPELFKSQSAVDDMVDNLAFTLGVGREDLNIVATAKGLISGPIDLILRDGSIHSCDSASDTGILLPSVNLITKINFGLIRWVLVIEKEATFRTLAAAKYSRTSRAGQGILLTAKGYPDLATRRFLFLLHSVRPELSLFALVDFDPHGIAIMRTYKHGSQRLEHEQNAAVPCLQWLGLHSGDVIMNLPAKYPSACDSIQNQDSQQPASQESAEYLISDSRREKPMKRARHSKEQESSESIIPLTERDRKKAVQVMREIWNPGNMTEEGADQVRELQRMLMLNVKAEIQAVDSYGDIANWLDGKLSV

SEQ ID NO: 3696 - DNA, 2271 bp, Myceliophthora thermophilia
atggcacgaagaaaggccaacggtgcaacggccgatacagagccgctcctcgaacagggctcgaccagaaaacgatccagcaacgctggtgatccagaccacgcagtcaagaagcagcggccggcgctcgaagagaagaccgattactcacgatggcgcctgcgagatgatcacggcagacacacctggcgctatctggaggacgacgaagccgccaaggcctggccgcaaacctacgccgacaagtacttcttgggcctgccgctggatctcccagatcttccgaagcccaagaagccactcgacgccgtccgaaacggcctcgagttctttgagaagctccagctgcccagcggccactgggggtgcgagtatggcggtcccatgttcctcctcccctgcatcgtcatctcgtggtacgtgaccaagacgccgattccctggtactacgccaccgagatcaagaattacctgtttgcccgtgcgcatccggaggatggtggctggggtctgcacatcgaaggcgagacctccgtgttcggaacggctctcaactacacagtgctgcggctggtcggcgtggatgctgatcaccccaagatggtgaaagcccgcgctacgctgcacaagctggggggtgcaacccatgcgccgcattgggcaaagtggtggctcgcggtcctaggagttgcccactgggacattgtcaaccctgtgcctcccgagctgtggcttcttcccgactgggtcccctttgcgccgtggagatggtggattcacatccgaatggtcttcttgcccatgagctacctttggtccaggcgatggacggccgaggagaccgacgtcatccgctcacttcgcaaggaacttttcgtcgaggactgggacaagatcaactgggcagcacaccgcaacacaatccacccgagagacaactaccatcccaagtcctggttgctgaacatgatcaattggttcttcgccaacatttggaggccttacttccgagtcaagcccctcgtcgacagggccgaggattgggttatgaagttgattgagatggagaacaagaacacagaccacttggaccttgccaccgtatccggtcctatgaatcttgtctgcctctacgcgcgtgatgggccggactcgtatgccgtgcgcaggcaccaagaacgctcggacgagttcctctgggtgaaggacgagggtcttctcgccaacggcaccaacggggtgcagtgctgggatacggcattcgccatccaggccatcatggacgcgggcttgaccgaggacccgcgctggaggcccatgctgctcaaggcgctcgagttcctcgacgatcaacaaattcgtgacaacgtagaggaccaagacaagtgctaccgccagcagcgcaagggcgcttgggcgttcagcaacaaggatcaaggatacgccgtgagcgactgtgtctccgaagccctgaagtccgtcattatcctgcaaaagacccccggctttccaacgctgatcgacgaccaacgcatctttgatgccatcgacaccctcctcacctaccagaatcctaacggtagctgctcgtcctacgagccgccgcgcgcggggccctggatggagatgctcaacgctgccgaagtcttcggcaggatcatggttgagtacgaataccccgagtgcacgaccgccgttgtgaccgcactctccctcttccataagcactggcccgagtaccgtgcccgcgagattgagcgcttcatcgagcgcgccgtggcctggatcaagaccaaccaacggccgcacggtgggtggtacggcagctggggcatctgcttcacctacgcgaccatgttcgccctcgagagcctcgccagcatcggggagacctacgaaaatagttcccacgccaagcgtggctgcgatttcctcatttcgaaacagcgagaagacggcggctggtcagaacactacagagcatgtgaaacaggggaatacgtcgagcaccccacgggctcacaagtagtgatgacggcctgggctctgattggcctgatgaaggccaactaccccgacaagaagcccatcatgaagggcatcaagcttctcatggagcgccagcagcctaacggcgagtggctgcaggaggcgatcgagggcgtcttcaacaagagctgcatgatctcgtaccccaactacaagttcacattccccatgaaggccttgggtatgtttgcgcacaagtaccctgatgagactgtcgtttag

SEQ ID NO: 3697 - protein, 756 aa, Myceliophthora thermophilia
MARRKANGATADTEPLLEQGSTRKRSSNAGDPDHAVKKQRPALEEKTDYSRWRLRDDHGRHTWRYLEDDEAAKAWPQTYADKYFLGLPLDLPDLPKPKKPLDAVRNGLEFFEKLQLPSGHWGCEYGGPMFLLPCIVISWYVTKTPIPWYYATEIKNYLFARAHPEDGGWGLHIEGETSVFGTALNYTVLRLVGVDADHPKMVKARATLHKLGGATHAPHWAKWWLAVLGVAHWDIVNPVPPELWLLPDWVPFAPWRWWIHIRMVFLPMSYLWSRRWTAEETDVIRSLRKELFVEDWDKINWAAHRNTIHPRDNYHPKSWLLNMINWFFANIWRPYFRVKPLVDRAEDWVMKLIEMENKNTDHLDLATVSGPMNLVCLYARDGPDSYAVRRHQERSDEFLWVKDEGLLANGTNGVQCWDTAFAIQAIMDAGLTEDPRWRPMLLKALEFLDDQQIRDNVEDQDKCYRQQRKGAWAFSNKDQGYAVSDCVSEALKSVIILQKTPGFPTLIDDQRIFDAIDTLLTYQNPNGSCSSYEPPRAGPWMEMLNAAEVFGRIMVEYEYPECTTAVVTALSLFHKHWPEYRAREIERFIERAVAWIKTNQRPHGGWYGSWGICFTYATMFALESLASIGETYENSSHAKRGCDFLISKQREDGGWSEHYRACETGEYVEHPTGSQVVMTAWALIGLMKANYPDKKPIMKGIKLLMERQQPNGEWLQEAIEGVFNKSCMISYPNYKFTFPMKALGMFAHKYPDETVV

SEQ ID NO: 3698 - DNA, 4074 bp, Myceliophthora thermophilia
atggcgactaccctcccggcaaacccgaccccgcagacggtcagccagcttctgaccaaaatcaccgacgtcgaccccgacttccggtttatggctctcaacgatttactcacggtattcaacactgcgaaaaacgacttcctgaatcacgacttcaatacggcggctcggaccgtcgaccatgttgtccgcgcgctggacgatcagaacggcgaggttcagaaccaggcgataaaatgtctcggccctttagtcaagaaggtcaccccgcaattaatcgctccgatgatggagaagctctgcagcctgaaactgaagaattcggtcgacaactccatcccatccatggcgatcagagccgtggtagaggctttgcctcgcccagtgcctggcgtggcgccgtccaaggaggtcaacgaggcatattctagtcttagccgcgtgcttattccgcgctttcttggtcgtgccggcccacccggcaagtccagcccgggtctactcgaccccgaagatccaaattccgattccgtcgatgtactcattgaggtagtccggtgcttcgggcccatgctgcagtcgtttgagattgaggcccttcataatgccgtcgttaccattcttgagaaagacagaggcaactcggtggttaaaaagagggcagttgttgctatctcgatgctcgcccactatctttccgacgaactgctctctgctttcatcaagcgcgtttccggggtattgggccagttgcagctgaaggattccactcgccgactttacatcacggtcctaggctccatggctcggtccatcccttaccgattcgggtttcaccttgcggagttggcacctttggttctccgcgttttgagcgaagaggagcttcaggcacagcttgaggagatcaacgagggcggaggggcgaccctcgagttcaacgaagttcgcgaggcagcactagtcgccttggaagccttcctttcgtcgtgtccgacacaaatgcgtcccttcacaaacgaagccatcgatgcctgcctccgctacctgaagtacgatccaaactatgcgtttgacgaagacgaggaaatggaagacgaggaggaggacgaagacgagtttgaggaagatgacgagtttgaggccgctggaggctttgatgacgatgacgacgcgagctggaaagttcggcggtgcgcggctaaagggctgtacaccattatttcgaccaggagcagcggcgacctcctcgatagcggggtgctctacggcactgtggctccagccctggtcaaaaggttcaacgagcgagaggaaaacgttcgtctcgaagtgctctctggaatgtcgctccttgtacggaagactggagagggagtgctaccccaattctccgccgacggtgtgcagagcgagtacctgaaccagccacctgccagtcggaagcggcggcgccaaagcagtgccggcggcccttccccttttggcctctccttggacccaacgactttgtccggcaccggcctcacttcacctactaaggaaaagattccggcaactggccctcgtgccgagctggctagactgaccccagccatagtcaaatccctgaccaagttgctcaagggcaaactcatcccgacgaagcaggcatgcatcaagctcctggacgatatagtatgcgtgcagtggggcggtttagaatcatacttcgacctgattgtcgatcctgtcattgatgcaatcaagccatcgagcgctgcatctacctctgcgtctatgtcatctacaggcggcggtgcttctgcaactgccactactctcaggattgaggcgcttcgtctaaccagcgacatctcaaagaaacactcgtcagccgtcctgcagcctcacctgtctaaaatcgtcgctggcgttgtttcagtcgctcatgaccgtttctataagatctcgggagaggccgtgcagactgccgaggagctgatcaaggctatcactccaccacggtctcgatccacggcccaaaacttcaagaatgagctccagaagctgtatgatatcgtcatcgatcgggcgactgccaacgacgcggacgccgaggttcgtcaaaaggcgatccacgctctcggtacactgttagctcaaacaaccggcacggagggatcggctcttttacctgatgagaagcgcaaggcttcgcttacctgccttctcgagagactgaagaacgagacgacgaggctagctgccgtgcgcgccatcgatactgccgccgcgatgtcagcggatgctgttcagttcgagccgcattggacccgccaggtggttgttgagctggcatcccaattgcgaaagtcgaatcgtgccctgagaggatcaagtgtcatggcactgaagcatcttaccttgtcgcccgctaccaaaggtgccctggatgaggccaccgtgcggacagtcgtagatgcgctgacccctgtgatcaacaacaatgatgctcagctgcttggccccggccttcttgccctggctcgtcttacccaggacatgccgagcatcgttctgaacccgcagctcatcgacgctctctgcaggttgctccagaccactgtcgttggcacggttctcgattctctgttggttctggtcacccaggcggggcaaactgggcacggaaaacctctgatgggggcgttcctcaaggatgtcggtgttggaggcgacccctcgattgtcggaaaggtgattggaacacttctggtggccagcggtgattccgccggagtcactcttgacagctttgtccaggaaatcgaaaacaactcgtcagacctgactcgaagaagccttgcgctagctgtcattggcgaagctgggttgcgcctcggcaacagattcccaattccaccgacattattcctgcagcagttcagcaacgagtacgacaaggtgacactcgccgcggctgccgcccttgggcgggctggagcgggtaatgtctctgtttacctgccagtaatcttacagtcaatgcagcaaaagggtggcaggcaatacatgcttctacagtcgatcaaggaaattctccagcaagttgccgtctcttcaaccaacatcggcgagttctctatgtcgatctgggagcagatactggcggccagcgagaccgaggacaacaaggcggtttgtgctgaatgcgttgggcgaatggttattatcgacccaaagacgtacatgcccaagttggagtccttattcaagaacacctcggttgctctaagagccatcgcagtccaggctctccggtataccttgccagacgacaacgatgcgttcgatgcatatctcaggaactctcttgttgatctcctcaagatcgcgctcggcgataacgagatggagattcggcgccacgccatgtccacgctcacatcagcagcgcacaacaagcccgaactggttttggcgcacctcaaccacttgatgccgtttgtgatgaacgagacagtaatcaagccagagctcatccgcgaggtgcagatgggcccattcaaacatatcattgacgacggcctggaagtgcgaaaggcggcgtacgagactctctatgcgctgatggagacagccttctcccgtgtgagtattattgatctctatgaccgtattgttgccggcctctccgacgacaatgacatccgcgccctctgcaacttgatggtctcaaagttggtctacctcgaccctgatgagactgtccggcgactcgattcgatcgccgagggcttccggaaaaccttgtctcataagctcaagggcaacgccgtcaagcaagagattgagaagcaagaggaggccaacaagtcagtgctacgcctcacgctcctgcttggggacaagcttaacaagagtgccctcaacacgaccggggctcaagctgctgctggtgccgccgccgggtcgaaccaagtctggaccagctattgggagtgggtcaatagggacttcgcaacccagctcaggagcatcagagatgagagcaaggctgtcgatccggcagatgatgcctccgctccatag

SEQ ID NO: 3699 - protein, 1357 aa, Myceliophthora thermophilia
MATTLPANPTPQTVSQLLTKITDVDPDFRFMALNDLLTVFNTAKNDFLNHDFNTAARTVDHVVRALDDQNGEVQNQAIKCLGPLVKKVTPQLIAPMMEKLCSLKLKNSVDNSIPSMAIRAVVEALPRPVPGVAPSKEVNEAYSSLSRVLIPRFLGRAGPPGKSSPGLLDPEDPNSDSVDVLIEVVRCFGPMLQSFEIEALHNAVVTILEKDRGNSVVKKRAVVAISMLAHYLSDELLSAFIKRVSGVLGQLQLKDSTRRLYITVLGSMARSIPYRFGFHLAELAPLVLRVLSEEELQAQLEEINEGGGATLEFNEVREAALVALEAFLSSCPTQMRPFTNEAIDACLRYLKYDPNYAFDEDEEMEDEEEDEDEFEEDDEFEAAGGFDDDDDASWKVRRCAAKGLYTIISTRSSGDLLDSGVLYGTVAPALVKRFNEREENVRLEVLSGMSLLVRKTGEGVLPQFSADGVQSEYLNQPPASRKRRRQSSAGGPSPFGLSLDPTTLSGTGLTSPTKEKIPATGPRAELARLTPAIVKSLTKLLKGKLIPTKQACIKLLDDIVCVQWGGLESYFDLIVDPVIDAIKPSSAASTSASMSSTGGGASATATTLRIEALRLTSDISKKHSSAVLQPHLSKIVAGVVSVAHDRFYKISGEAVQTAEELIKAITPPRSRSTAQNFKNELQKLYDIVIDRATANDADAEVRQKAIHALGTLLAQTTGTEGSALLPDEKRKASLTCLLERLKNETTRLAAVRAIDTAAAMSADAVQFEPHWTRQVVVELASQLRKSNRALRGSSVMALKHLTLSPATKGALDEATVRTVVDALTPVINNNDAQLLGPGLLALARLTQDMPSIVLNPQLIDALCRLLQTTVVGTVLDSLLVLVTQAGQTGHGKPLMGAFLKDVGVGGDPSIVGKVIGTLLVASGDSAGVTLDSFVQEIENNSSDLTRRSLALAVIGEAGLRLGNRFPIPPTLFLQQFSNEYDKVTLAAAAALGRAGAGNVSVYLPVILQSMQQKGGRQYMLLQSIKEILQQVAVSSTNIGEFSMSIWEQILAASETEDNKAVCAECVGRMVIIDPKTYMPKLESLFKNTSVALRAIAVQALRYTLPDDNDAFDAYLRNSLVDLLKIALGDNEMEIRRHAMSTLTSAAHNKPELVLAHLNHLMPFVMNETVIKPELIREVQMGPFKHIIDDGLEVRKAAYETLYALMETAFSRVSIIDLYDRIVAGLSDDNDIRALCNLMVSKLVYLDPDETVRRLDSIAEGFRKTLSHKLKGNAVKQEIEKQEEANKSVLRLTLLLGDKLNKSALNTTGAQAAAGAAAGSNQVWTSYWEWVNRDFATQLRSIRDESKAVDPADDASAP

SEQ ID NO: 3700 - DNA, 2217 bp, Myceliophthora thermophilia
atgcaggtgggattgcggccgcgtttgagggcgcggccgtcgctagttgacctgttggttcgagctggaggcggcactggtagccagtctcggtcggcgggcgacccgccgcccacagcacccgcaaaaggaacgcccgctgcatcatcgcctccactcttctcggcgggcaccgccccgggatcccaccgggacctggagcttctcgctggcgtcctggaacaagccgcaaacctcccacttccaccgtcgcccgacataccacccctctgcgcgtctgccccgccatcgccgacgcccattccgaacagcaacccttcgattgtcattaaccctgcacctgcatctgctccctccgacgccgctgccactgcaattgcgtcgtcgcccagcatggccccttcaaagacggacggcgacaaagatggattccaaacaggcaaggtctactcggtctcgggacccgtcgtcatcgccgaggacatggccggcgttgccatgtacgagctggtgaaagtgggccaccatcagctcgtcggtgaagtcattcggatcaatggcgaccaagcgaccattcaggtatatgaagagacagccggtgttacagtcggcgaccccgtactgcggaccggcaagcccctgtccgttgagctcggtcccggtctcctaaacaacatctacgacggcatccaacggccgctggagaagatctcgaccatggccaagagcatctacatccccagaggcatcgtcgcccccgcgctggaccgcgagaagaagtgggatttcaccccgaccatgaaggttggcgatcatatctcgggcggcgacgtgtgggggacggtttacgagaactcgttcatttcggtccacaagatcatgcttcccccgcgggctcgcggcaccatcaccaggatcgccgagaagggcagctacacagtcgtcgacaagctcctcgaagtcgagttcgacgggaagaggactgagtaccccatgatgcactcctggcccgtgcgggtgccgcgcccgaccaccgagaagttgtctgccgaccagcccttcatcgtcggccagcgcgtgctcgacgccctcttcccctccgtccagggcggcaccgtcgccatcccgggcgctttcggctgcggcaagaccgtcattagccagtctgtctccaagttctccaacagcgacgtcattgtctacgttggttgcggagagcgtggtaacgagatggccgaagtgttgaaggacttcccggagctcactatcgacatcgacggccgcaaggagcccatcatgaagcgcaccactctcatcgccaacacttccaacatgcccgtcgctgcacgtgaagcttccatctataccggcatcacggtcgctgagtacttccgcgaccagggcatgaacgtggccatgatggccgactcgtcctctcgctgggccgaagccctgagagaactctcgggtcgtctgggagaaatgccagcggaccaaggtttcccggcctacctcggtgccaagcttgcctcattctacgagcgcgccggcaaggtccaggccctcggcagccccgctcgcgagggcagtgtcagcatcgtcggcgccgtatccccgcccggtggtgacttctccgaccccgtcacgtccgccaccctcagcatcgtgcaggtcttctggggtctagacaagaagctcgcccaacgcaagcacttcccgtccatcaacacctcgatcagctacagcaagtacaacatgatgctcgacaagtggtacgagaagaaccacccggagttcccgcgcctgcgcgaccgtatccgccagctgctgtcggactcggaagagctcgaccaggtggtgcagctggtcggcaagtcggccctgtcggacccggacaagatcacgcttgacatggcgaccctgatcaaggatgactttttgcaacagaacggctactccgactacgaccagttctgccccctctggaagaccgagtggatgatgaagctcatggtgggcttccacgacgaggcccaaaaggccatcgcccagggcctcacctgggccaaggtgcgcgaggccacccaggagctgcagtcccagctgcggagcctcaagtttgagctgcccagcgagggcgaagaggtgatttgcaagaagtatgaggccatacagcaggccatgatggacaagttcgcctcggttgtggacgagtaa

SEQ ID NO: 3701 - protein, 738 aa, Myceliophthora thermophilia
MQVGLRPRLRARPSLVDLLVRAGGGTGSQSRSAGDPPPTAPAKGTPAASSPPLFSAGTAPGSHRDLELLAGVLEQAANLPLPPSPDIPPLCASAPPSPTPIPNSNPSIVINPAPASAPSDAAATAIASSPSMAPSKTDGDKDGFQTGKVYSVSGPVVIAEDMAGVAMYELVKVGHHQLVGEVIRINGDQATIQVYEETAGVTVGDPVLRTGKPLSVELGPGLLNNIYDGIQRPLEKISTMAKSIYIPRGIVAPALDREKKWDFTPTMKVGDHISGGDVWGTVYENSFISVHKIMLPPRARGTITRIAEKGSYTVVDKLLEVEFDGKRTEYPMMHSWPVRVPRPTTEKLSADQPFIVGQRVLDALFPSVQGGTVAIPGAFGCGKTVISQSVSKFSNSDVIVYVGCGERGNEMAEVLKDFPELTIDIDGRKEPIMKRTTLIANTSNMPVAAREASIYTGITVAEYFRDQGMNVAMMADSSSRWAEALRELSGRLGEMPADQGFPAYLGAKLASFYERAGKVQALGSPAREGSVSIVGAVSPPGGDFSDPVTSATLSIVQVFWGLDKKLAQRKHFPSINTSISYSKYNMMLDKWYEKNHPEFPRLRDRIRQLLSDSEELDQVVQLVGKSALSDPDKITLDMATLIKDDFLQQNGYSDYDQFCPLWKTEWMMKLMVGFHDEAQKAIAQGLTWAKVREATQELQSQLRSLKFELPSEGEEVICKKYEAIQQAMMDKFASVVDE

SEQ ID NO: 3702 - DNA, 3849 bp, Myceliophthora thermophilia
atgactcgtccagctggtgcgagtttcgcccagtttttccctgacgcgccccgggaacgcgagagggcgagaatgaaagcgcaggaatccccgtcggctcaccctggcgaagccaatcaacagcgcacccccctcaacccttcggcgtcttctcatagtgacgaagggcctcgtactggcttcgcatcgagatcccacctcaatggcaccggtcctcatactgcacaccctccgacggaagacatcgagtcgctcaccggagatacgatcaacaccggcgggtcggccagctcccataccagcgcaagctcctcggtctttagtgctgcggcgcggccgagcgcaccgggcgctgtgaaactcccacatacccaacccaccccgcctaccgccatcacctcaccgtcgtcatacctatctacaactgtccctgccaaggcgcagccgaccactccttgccgtgccgacggagtagagggacccgtaccgatgcctagcggatctgtccctgacgccccggctatcgaacgcgtgcctgcacgagacccctctcgctcgatcaaatgcgtaaagcgcacgtatgatcctcttctggatacatcgctttccagctccgagaagagaaaggcgaaaccgatatacaaagagtttggattggacgacgaagatgacgctcccccctcagatccccgcctagcaaaaggcggtcggctcaactacatcaatgtcgacttccaccttccgaaggcccggttgcgccatgcgccctacaatctcaagccgtacaagtatgatccgaagacgtcttgcgggcctgggcctcccacccagatcgtcgtcaccgggttcaaccccctgattgcgttctccaaggttactgccatctttgcctcttttggcgagatcgccgagagcagcaacaagatgcacccagacaccgggagttacttaggtttcgctacctttcgttatcgggattcgaaaccacaccgctcacgtccgttcccgatctccgctgccgacgcagcgcagcgcgccattcgagccatgcacgggaagcggatagaggccaacacagtccgtgttgagtacgatccagagggcaagaagagctcccgcatgctggaggaggccctgaagaaggaaaatgaggcgtcgcacaatgcggccgagccgaagattcccacgggcccaaaacccaaagacatcattcccggcccccctccgaccgcgcccaagggccctgcggcgcaccgtggtagcctaatcaatgtccagggagtctgggtgccgaagccgaggctggatacaatcatcgaaactgaacccatcgcgaatcaactcaagcacgacccgtacatattcgtagcccacgagcatgtccccgtcatgccgaccaccatcgcccatatgaagcggcgtcttaaaacgttcatgtttgaggacattcgggcggacaggacgggctattatattatctttcgcgattcgggattcggccgctccgaggccgaacgatgctttcggtcagcgaatcacaccactttctttacctacaccatggtcatggacctccacgtccacggaaccctcggcaaggcgtcacgtcccgtcgatactcggcggcgtagtcgcaccccagaccggagacacggtgaggacacccgatcgtatcgtgaacatgatcgcagcaggcgcgaagaagagcgggcaaggcgcgaggaagagcgagccaggcgcgaggaacaagagcgtcgccggcgggaggaagaagcggacctcgaggaggagaagcgacagcgcgccaagaactttgacccggtgctggaggccaccgacgtggttctgcgcgagatgaaggaacagctgatcaaacacatccgtaccaagatcgcggcaccggcgctcttcaacttcctcgaccctgtcaatcacatagccaagcggcgccagctaaacctcgaagacccccagaacgccggacttccccctatcttgcttgatgacttcgaggacaggtctccggttgggactccgaattccagggcagatcccatagaacggcgaaccgcccgtctcgacgtgtccaccctgcctcgtatccgcaaggtcaagaatgccggactgaatgcgcgaaagcacggcttcaacgacccatttgcgcggaatcggcccgccgccaggcgcacagccttccggtctctgcattaccggctgaggagcgacagcgagggcgagtccgatgatgaggctgagaatacgacgctgttcggcagagacacggaagagcccgagtctcgacctcggagccggatgagctcagattttgaggccgaaaaagacgagtttgcaacctggggacctggcgaggatgactccatgacggaggccagctttgcgctgggtgatggctccgggctacccaagaagcggaaacttgaccttcaggtcgaaacggccatcaaacggcagaagaagacagacgaggagctgttcggaatcaccattgaccgtatcgagaccgagtttccgtcgagggaagcctccgaagacaccttggttcgcgatgccgaggctgctgaggagaaggacaccgacggctcccgattgccgacacctttacctcaaggagccaaggccaggaagaaggcgcccgccaagcccaaaaagaagtccaagaagcagctctttgaggagagggaagccctcaaacggcagcagcaggagatctacgagagggaagcggaggcccggcggtcggaagatgtggacgaggccaaaccgacgcccgagtcggaggctgagctcaagaaacccggagcggaagaagagaaggcagatctggacgagaatatgtatccatcagagaaagtttcggctctcgagcttccacaggatttccggttcgatgtggcaacgttggaggagctggcgctcggagaggccgatcagccagatcttgcaaagctccaaaagaagtttggtcgtgggaagctcgaagaccctgagctgtggttgtggaggcggaaccgcatccgggagctgaactcggctgacgggacgtcgaaaaatccggttcgcattgagggctactatgtcccgaaccccactggctgcgcccgaaccgaaggagtcaagaagattctcaactcggagaagtccaagtacctcccccatcatctcaaagtcaagaaggccagggaggagcgtcaggcgcagaacggcaagagcgcaaaagattctgttctggccgcggccgaggccgcccgactggcagccgagagccttgtcgccaagggcaactcgcgcgccaaccgtgcaaacaaccgccggttcgtcgccgacctgaatgaccagagaaagacgctcggccaggattcggacgtcttgcggttcaaccagctcaagaagcggaagaaaccggtcaagttcgcgcgatcggcgatccacaactggggcctatacgcgatggagaacatccccaaggacgacatgatcatcgagtacgtgggtgaggaggttcggcaacaaatcgccgagcttcgggagcacaggtacctcaagagcggcatcggcagcagttatctcttccgaatcgacgacaacaccgtcatcgacgcgaccaagaagggcggcatcgcgcggtttatcaaccatagctgcatgcccaactgcacggccaagatcatcaaggtggaaggcagcaagcggatcgtcatctacgcgctccgagacattgcgcagaacgaggagttgacgtacgactacaagttcgagcgcgagcttggcagtacagaccgcatcccctgcctgtgcgggacggccgcgtgcaagggcttcctcaactga

SEQ ID NO: 3703 - protein, 1282 aa, Myceliophthora thermophilia
MTRPAGASFAQFFPDAPRERERARMKAQESPSAHPGEANQQRTPLNPSASSHSDEGPRTGFASRSHLNGTGPHTAHPPTEDIESLTGDTINTGGSASSHTSASSSVFSAAARPSAPGAVKLPHTQPTPPTAITSPSSYLSTTVPAKAQPTTPCRADGVEGPVPMPSGSVPDAPAIERVPARDPSRSIKCVKRTYDPLLDTSLSSSEKRKAKPIYKEFGLDDEDDAPPSDPRLAKGGRLNYINVDFHLPKARLRHAPYNLKPYKYDPKTSCGPGPPTQIVVTGFNPLIAFSKVTAIFASFGEIAESSNKMHPDTGSYLGFATFRYRDSKPHRSRPFPISAADAAQRAIRAMHGKRIEANTVRVEYDPEGKKSSRMLEEALKKENEASHNAAEPKIPTGPKPKDIIPGPPPTAPKGPAAHRGSLINVQGVWVPKPRLDTIIETEPIANQLKHDPYIFVAHEHVPVMPTTIAHMKRRLKTFMFEDIRADRTGYYIIFRDSGFGRSEAERCFRSANHTTFFTYTMVMDLHVHGTLGKASRPVDTRRRSRTPDRRHGEDTRSYREHDRSRREEERARREEERARREEQERRRREEEADLEEEKRQRAKNFDPVLEATDVVLREMKEQLIKHIRTKIAAPALFNFLDPVNHIAKRRQLNLEDPQNAGLPPILLDDFEDRSPVGTPNSRADPIERRTARLDVSTLPRIRKVKNAGLNARKHGFNDPFARNRPAARRTAFRSLHYRLRSDSEGESDDEAENTTLFGRDTEEPESRPRSRMSSDFEAEKDEFATWGPGEDDSMTEASFALGDGSGLPKKRKLDLQVETAIKRQKKTDEELFGITIDRIETEFPSREASEDTLVRDAEAAEEKDTDGSRLPTPLPQGAKARKKAPAKPKKKSKKQLFEEREALKRQQQEIYEREAEARRSEDVDEAKPTPESEAELKKPGAEEEKADLDENMYPSEKVSALELPQDFRFDVATLEELALGEADQPDLAKLQKKFGRGKLEDPELWLWRRNRIRELNSADGTSKNPVRIEGYYVPNPTGCARTEGVKKILNSEKSKYLPHHLKVKKAREERQAQNGKSAKDSVLAAAEAARLAAESLVAKGNSRANRANNRRFVADLNDQRKTLGQDSDVLRFNQLKKRKKPVKFARSAIHNWGLYAMENIPKDDMIIEYVGEEVRQQIAELREHRYLKSGIGSSYLFRIDDNTVIDATKKGGIARFINHSCMPNCTAKIIKVEGSKRIVIYALRDIAQNEELTYDYKFERELGSTDRIPCLCGTAACKGFLN

SEQ ID NO: 3704 - DNA, 708 bp, Myceliophthora thermophilia
atgtcccgtgcagcggcgccctccggcgcaaaaacgcgcctcatgagcgagatgaaggcgctgcggaaggagaagtggataaactttgaagatgaggaacaagagaacatcctcaagtggcggttcgcgctcatggtgatcaactctgacagccccttcaacggcggctacttcagggccgagatggttttcaccgacgaatacccgtaccagccgcccaagttccgctttctaatacccatcttccaccccaatgtctaccctgacggccagctttgcatctcgattctgcacaagcccggcgaggatataatgtcgggtgaggatgcgagcgagcggtggtccccactccagggagcagagagcgtgctccgctcggttctgctcctgctcgacgatcccgagatcaactccccggccaacgttgatgccagcgtcatgtatcgcgatcgccgcggcgagtattacgagaaggctagagagaccgttgagcggtcaaagaacgatattcccgaggggtttgagacgcccacgagtttcgaagcggccccgccaccgaaacaagaggacgacgacgatttctgggctggcagctcggacgaggagttcgattttgacggcagcgatacaggggacgacgaagaaatggatttcgaggaagaagaagaagaggaggaggaggaggaggaggaagaggaggacaagtga

SEQ ID NO: 3705 - protein, 235 aa, Myceliophthora thermophilia
MSRAAAPSGAKTRLMSEMKALRKEKWINFEDEEQENILKWRFALMVINSDSPFNGGYFRAEMVFTDEYPYQPPKFRFLIPIFHPNVYPDGQLCISILHKPGEDIMSGEDASERWSPLQGAESVLRSVLLLLDDPEINSPANVDASVMYRDRRGEYYEKARETVERSKNDIPEGFETPTSFEAAPPPKQEDDDDFWAGSSDEEFDFDGSDTGDDEEMDFEEEEEEEEEEEEEEEDK

SEQ ID NO: 3706 - DNA, 1653 bp, Myceliophthora thermophilia
atgaagaagtttctcgggctcaggggccaggccctcaacctggccgtgggcaccatagcaggatgcgactttctcctctttggttacgaccagggagtcatgggcgggatattgactctcaaggtcttcctcgacgccttccccatgatcaaccccgaagctgccggccttagccacgatgagtcgtcgacacgttccacctaccaaggtattgccgttgcctcgtacaacctgggttgcttcctcggcgccatcatcaccatcttcctcgggaaccctctcggacgcaagcgcgtcatcatgctcggcacctccgtcatggttatcggcgccatcctgcaggccagctccaccaccctcccgcagtttatcgttggcagaatcatcaccggtctaggcaacggcggcaatacatccacggtccccacatggcagtcagaaacgtccaaagcgcacaagcgcggcaagatggtcatgatcgaaggcgccctcatcacgtgcggcatcatgatcagctactggatcgacctgggcctgtccttcgccccgggatccgtcgcctggcgcttcccgctcgccttccagatcttcttctgcgtcatcatcctcgccttcatccccttcctgcccgagtccccgcgctggctcatcctcaagggtcgcgaggacgaggccagggaggtgattgccgcgctcgaggacaccgacacgtcggaccgcatcgtcgagaacgagttcctcgccatcaaggagaccgtcctggagatgtccaagggcaccttccgcgacctcttcaccatggacaagaaccgcaacctacaccgcaccctgctggcctatttcaaccaggtcttccagcagatcagcggcatcaacctgattacctactatgcggctgtcatctacaagggcctcggcatgtccgatttcctctcccgcctgctcgcggcactcaacgggacggaatacttcctggcctcgtggccggccgtcttcctggtcgagcgggtcggacggcgcaacctgatgctcttcggcgccgtcgggcaggcggcgaccatggccatcctggcgggcgtaaattcgcggcaggagacgggcttccagatcgccggcatcgtcttcctgttcgtcttcaacaccttcttcgccgtcggctggctcggcatgacgtggctgtacccggccgagatcgtgccgctgcggatccgcgcgcccgccaacgcgctgtcgacgagcgccaactggatcttcaacttcttggtcgtcatgatcactccggtcgccttcaacaacatcggctaccagacctacatcatctttgccgtcatcaacgccttcatggtgccctgcgtctacttcttctaccccgagacggcctaccgctcgctcgaggagatggacaacatcttccacaaggtcgccgacggctggaagggcgtcttcaccgtcgtgcaccaggccaaggtcgagccgcgctggtacggcaagaacggcgagctcctggtagactaccagcagaccgaggaacacaggcgtcatctgcaacagcaggaaggcgccgtgacggcctccgaaaagaggtccgtcgagggcgccgggagcggaagcgggagcggtgatgtgaagcaagacgagtacaaggactgctga

SEQ ID NO: 3707 - protein, 550 aa, Myceliophthora thermophilia
MKKFLGLRGQALNLAVGTIAGCDFLLFGYDQGVMGGILTLKVFLDAFPMINPEAAGLSHDESSTRSTYQGIAVASYNLGCFLGAIITIFLGNPLGRKRVIMLGTSVMVIGAILQASSTTLPQFIVGRIITGLGNGGNTSTVPTWQSETSKAHKRGKMVMIEGALITCGIMISYWIDLGLSFAPGSVAWRFPLAFQIFFCVIILAFIPFLPESPRWLILKGREDEAREVIAALEDTDTSDRIVENEFLAIKETVLEMSKGTFRDLFTMDKNRNLHRTLLAYFNQVFQQISGINLITYYAAVIYKGLGMSDFLSRLLAALNGTEYFLASWPAVFLVERVGRRNLMLFGAVGQAATMAILAGVNSRQETGFQIAGIVFLFVFNTFFAVGWLGMTWLYPAEIVPLRIRAPANALSTSANWIFNFLVVMITPVAFNNIGYQTYIIFAVINAFMVPCVYFFYPETAYRSLEEMDNIFHKVADGWKGVFTVVHQAKVEPRWYGKNGELLVDYQQTEEHRRHLQQQEGAVTASEKRSVEGAGSGSGSGDVKQDEYKDC

SEQ ID NO: 3708 - DNA, 747 bp, Myceliophthora thermophilia
atggctgatcacggccacgttatgctaggcaggctagctcgagaccccgatctggagacctgctcacaccggcacgatatactcgcaatagctgctgaagctgacgaagcgctccctgttcctatgacgctataccactggtgtccaccaaccgtccacgcaacgactacggttgtcttgtctccacgtcttttgtcgatggtcaaaggctttacctttttaggaacattctttctgggagacgaactcgatatgtcggagatgcttaccagacttctcacggaacgaggtggaaatccggaaccaacgtctcacgtacttacaggtctgatagccgagcttgctgcaccaggccaagggacatttatgcatttcttctccttccctgtattcagcaataacccatctcatgtcttcggcgatggcctcttcccagtgtggaagtgggttaagcccgaaagcatttaccggaagatgggcttttgggaggcagatctatctaaagttctagaccacggggaatggaatgcaggtaaagaccttgtgttattgtcaggaggggtggccgaagaaacattgggaattatagtagctggagaccggaagtttccgggcctcaggccgctcttagctatgcagcgtagattctgcttcacgaggcttgtggccttcacgactgctatataccgtctctctacgcagtttttgacgccctcccctcctacaagcaaacccggcgtcgagtaa

SEQ ID NO: 3709 - protein, 248 aa, Myceliophthora thermophilia
MADHGHVMLGRLARDPDLETCSHRHDILAIAAEADEALPVPMTLYHWCPPTVHATTTVVLSPRLLSMVKGFTFLGTFFLGDELDMSEMLTRLLTERGGNPEPTSHVLTGLIAELAAPGQGTFMHFFSFPVFSNNPSHVFGDGLFPVWKWVKPESIYRKMGFWEADLSKVLDHGEWNAGKDLVLLSGGVAEETLGIIVAGDRKFPGLRPLLAMQRRFCFTRLVAFTTAIYRLSTQFLTPSPPTSKPGVE

SEQ ID NO: 3710 - DNA, 1185 bp, Myceliophthora thermophilia
atgaactacgaaggcgcgccagggcttgagttcggcggaggaaacacaaatatcgaccccaacgtcgccgcaaaactcccagcaggctgccgcgtcgtctcaacagcaagacacggcatcagcttctgggccaactccggcagaatcgacgtggtcctcgaagatggctcacccaaatccttcttcatcaaggtcgtctccaaagaggccggccgcaagatgatgagcggcgagttcgagtcgatcgcagccatctacaacctgctcccggacttcgtgcccgaacccatagcctggggcgcatacgaaaccgtgcccgagacatacttcttcctctgccaattccgcgagatgacaaccgaactccccgaccctcacagattcaccgcgcgcctggcggcgttgcacgaaaccggttcctcgcccaacggcaagttcgggtttcacattaccacgtgcgcgggcaacttgccgcagtattgtgggtgggaagacagctgggaggtgttcttttccaagagcctgaaacaggctctcgagcatgagatcgctgcccaggggccggatcctgagattgacaggcttgcgcctatcatatttgagacggtcgttccccggttactgcggccactggaaacggagggccggtcggtgaagccgtcgctggttcatggggatttgtggtatgctaatacggctactgacgctgatactgatgcgcctcttgtttttgatgcttgctgtttttatgcgcataatgagtacgagctgggtcagtggcgaccagtctgcaacaggcttgggcctgaatacgtcaagacgtaccactcttacatgcggatctcgcctcctgaggaggactacgaagggaggctagacctttacaaactacgcttcaacacacatgtctcggccttgtttccccatgatcggaattacaggactcagatgctgggtgacatgagggacctggttgaacgttacggcgtgacggcgtcggacaaggctgcagtggccgatgtacagagccagggccggtttggcttgttatacttcaataccgacgccatcttcaacggcaaaccctacctccacaagccaacccctatcctggtcaaagacctcaagttcccctccgacgacccggtcgtagccaaggtacaacacacctatcgagccctctaa

SEQ ID NO: 3711 - protein, 394 aa, Myceliophthora thermophilia
MNYEGAPGLEFGGGNTNIDPNVAAKLPAGCRVVSTARHGISFWANSGRIDVVLEDGSPKSFFIKVVSKEAGRKMMSGEFESIAAIYNLLPDFVPEPIAWGAYETVPETYFFLCQFREMTTELPDPHRFTARLAALHETGSSPNGKFGFHITTCAGNLPQYCGWEDSWEVFFSKSLKQALEHEIAAQGPDPEIDRLAPIIFETVVPRLLRPLETEGRSVKPSLVHGDLWYANTATDADTDAPLVFDACCFYAHNEYELGQWRPVCNRLGPEYVKTYHSYMRISPPEEDYEGRLDLYKLRFNTHVSALFPHDRNYRTQMLGDMRDLVERYGVTASDKAAVADVQSQGRFGLLYFNTDAIFNGKPYLHKPTPILVKDLKFPSDDPVVAKVQHTYRAL

SEQ ID NO: 3712 - DNA, 495 bp, Myceliophthora thermophilia
atgcctcaccgctttcagggacccgccgcaatccagcgggccgagaagtcgccgcctaagccaacaaacttccgcgtcggcgccctcgtgctcgacgtcgacaccaacaccattctggcgacgggatatacgctcgaacttgagggcaacacgcacgccgagcagtgctgcttcatgaagctcgccaaggaacacaatgtcgccgaggaccagctaggccccctactgcccaagaacagcgtcctctacaccaccatagagccctgtaacaaacgactcagcgggaacctgccatgcactgagtggattctgaacctcaaaggcgcaatcaagactatctatgttggtgttctcgaaccagagaagtttgttaggcagaacgagggcaggaaaaagctggaggatgcaggcatcaaggtcgagctcgtggggggcttggaggaccgcatcctcgcggtggcaatggcggggcacaaacagaagggggaggtttga

SEQ ID NO: 3713 - protein, 164 aa, Myceliophthora thermophilia
MPHRFQGPAAIQRAEKSPPKPTNFRVGALVLDVDTNTILATGYTLELEGNTHAEQCCFMKLAKEHNVAEDQLGPLLPKNSVLYTTIEPCNKRLSGNLPCTEWILNLKGAIKTIYVGVLEPEKFVRQNEGRKKLEDAGIKVELVGGLEDRILAVAMAGHKQKGEV

SEQ ID NO: 3714 - DNA, 1116 bp, Myceliophthora thermophilia
atggtgaacattacggagaagatcaaggagatcgaggaggagatgaggaggacccaaaaaaataaggcaactgagtatcatttgggtctgttaaaaggaaagcttgctcgccttcgcgctcagttgctggaaccaggaccgggatcagggggcggtggaggcacgggcttcgacgtgagcaagagcggcgatgcacggatagctctagttgggttcccgtccgtgggcaagtcgacgtttctctccaaggtgaccaagaccaagtctgaagtcgcctcttacgccttcacaaccctgaccgccatccctggtgtactcgaatatggcggggccgagatccagctgctcgacttgcctggaatcatcgagggtgcggcggaaggcaaagggagagggcggcaggttatctcggcggcaaagactagcgatctcattctcatggtgctcgatgcgacaaagagggcagagcagagggcgttgttggaagccgaattggaggcagtagggatccggctgaatcgcgagccaccaaacatctacctcaagcccaagaaagccggcggcatgaagatcaccttccagtcgccacccaagggccttgacgagaagatgatcatgaatatcctccgggactacaagcttctcaactgcgaggtgcttgtgcgcgacgagaactgcacggtcgacgacctgatcgacgtcatcatgaaggaccaccgcaagtacatcaagtgcctgtacgtctacaacaagatcgacagcgtctcgatcgaattcctcgataagctggcgcgggagccgaacacggtggtcatgagctgcgagctagacctgggcattcaggacgtcgtcgaccgctgctggaaggaactaaacctgatccgcatctacaccaagcgcaaaggcgtcgacccggacttcaacgaggccctcatcgtgcggaacaacagcaccatcgaggacgtctgcgaccgcatccaccgctcgctcaaggacaccttcaagtacgccttggtctggggcgccagcgcgaggcatgtcccccagagggtagggttagggcatgtggttgcagacgaggacgtcgtgtacatcgtcagcgggtggaaagcgtag

SEQ ID NO: 3715 - protein, 371 aa, Myceliophthora thermophilia
MVNITEKIKEIEEEMRRTQKNKATEYHLGLLKGKLARLRAQLLEPGPGSGGGGGTGFDVSKSGDARIALVGFPSVGKSTFLSKVTKTKSEVASYAFTTLTAIPGVLEYGGAEIQLLDLPGIIEGAAEGKGRGRQVISAAKTSDLILMVLDATKRAEQRALLEAELEAVGIRLNREPPNIYLKPKKAGGMKITFQSPPKGLDEKMIMNILRDYKLLNCEVLVRDENCTVDDLIDVIMKDHRKYIKCLYVYNKIDSVSIEFLDKLAREPNTVVMSCELDLGIQDVVDRCWKELNLIRIYTKRKGVDPDFNEALIVRNNSTIEDVCDRIHRSLKDTFKYALVWGASARHVPQRVGLGHVVADEDVVYIVSGWKA

SEQ ID NO: 3716 - DNA, 384 bp, Myceliophthora thermophilia
atgtcttcttcctctaccgtgctcgccgctcgagacgtcaacacgtcgatgcctgctcaaggaaacgccgcttccgatatcgacgcaaacaccaagcccaacatcatgagcatggagcaccaccgccaggtcttccagtccaagatggagcaggggggcgagagcaagacctttgtttccccctcggataacatcatgagcccttgcaccgcgaagctgtccgcctttcgcagcaagcaggtcggcaaagtcaagccaaagtcgctcttcgcccaggcgtcagctaagagactcgaggccgagggcgtcagcaacggaggcgcgctcttcggcagtaagccggctgccgcgcccgcacgagatgccaaccccttcggcaactga

SEQ ID NO: 3717 - protein, 127 aa, Myceliophthora thermophilia
MSSSSTVLAARDVNTSMPAQGNAASDIDANTKPNIMSMEHHRQVFQSKMEQGGESKTFVSPSDNIMSPCTAKLSAFRSKQVGKVKPKSLFAQASAKRLEAEGVSNGGALFGSKPAAAPARDANPFGN

SEQ ID NO: 3718 - DNA, 2562 bp, Myceliophthora thermophilia
atggagatgatgaaggcggccagctccctcatgccgaagaagtttcgcagcgtacgggagaagaacggccatcgccgcaataagtcatccgaagatggcggtaaagtacggccgctgactgccgaatcatggctttctatcttcaagtcggattctggaaaacagtcgcagagggaaaaggaagaggtagaaaaagaatcggcgaaggttgaggtcatagccaagcgcttggaggaactcggctaccacaccgtcaccaaggacatcatccgactatcgcttcgttcaggctacgcgaagggaaacgtcgagaaggccgtcgagcttcttcagctccagcagcaggcgttttcggggataatacagccatacgaccccaatgtcgaaatgctcggcgccgagaacagggggaacgtaacgtgttatctcgactctttgctgttcgccatgttcgcccaccttacggcattcgagtctatgctgaagaatgacttggaaggagagccccaaaggaagctggccgctttgctgaggttatgggtcaacatgctcagaagcggcaagctgattcacaccgatatgcttgccttagccgagtgtggctggaaagacgccgcgcttcttgagcaacaggacacttccgaagcatttgccttcattgctgatgcacttcaattacccctcctcgcccttcaagtggacctgttccatcaaggaaaaggggatgccgatgatcacaaggtcgtccatgagaggtgcctcaacctcccagtacctcccgatactgaaggaaagggcatcaaactcgaggactgcatggaggcatacttcaacaacaaagttgacgttctacgcgatagtcttgaggaaaataaggccgctgataagccgacactgagtccggagaacacgatccggatggtccctgcagatggggacgagactccgcgtgccgaaaaggaaaacacgcagctacagcggcggtggacaactcacggagagattgtgcaatcaccagtctccgcctcgatgtccgatgccgtcgcatcctccaggacaaggtcaacgagcatcatacagcgctttgtggtggatgggaaagattcgaatggccccgccacagaccctgaaacaagcagtcttcttcagcgagccaggcggacgggatcaaatgtggttaaagcggtgacaattccggcttggcagttctaccgactgatacgtgagtccttgtgtgctgttgtgcccttggttggtatcttggaggctaacgccgtcttcactcctcctcttgcagcgtggaatgcgagctcaagcagcgcaccgagcagcgacatggagcttgctcggcatttcaatcagcgccctgtcgtcgccatctgcctgaaaagatacaccatgacagagaatggtgtgcctatccgactaaacactttcatcgatattcccgatagcctccgtctcccgcactttatggtcgttgacgatgccaaagaaggccaagaccccaacggcctaagtcaagggtacaagttagttttgcagtcagccatctgtcaccgaggcgaatcaattcacagcgggcattacatcgcctacgctcgggtcgcgcccaaacttttaacggataacaggaggcacgatcatgacccacctccggattacgaagaaccccaatgggtcaggtttgacgacctagcggtcgagaggcgggttgagcccgtagacgacattcaggagtgtctgcggcgccaggaagaaatgccctacgtcttgatctaccagatcgtgccgatggtggacgtaacaagcgcatcgaccgatggatctgttacagaacctccatgctacgttgaatcaacaacaactggccccgggacaccgaccgccgaagcggtgtccgatgcgggccaaatctcgaggtcggctagtggctatttcgatccggcagcgactctcgcccacaccgccccacgtattcgtctcagttccgaaattgaacggccgcagcggttaagtttcgaagacgacctgcgctcacttgccaatcaaataaacagctcacgagccggaagcgtcacgttctctgagcccccactgcatgtcaactctgccgtcagttccgaggccgtctcgccggtcgccaccccccaggaagagagtaccggagcgcggctttcgcgggcagcggcgatgttcaagactggcgctagcaagtctcgacccacgagccaagcaagcgagggccgaataagccttactatgtcgagattcggctttggcagacagagcagggagagcggctccaacggtactgcggcaaattcagaagcatcagcaatcgaacagggggggctcgcggcagacggagaggaagctgccggtgggaaggacaaagacaaggagcagcatcccttcgaccacaacaaaaaggaggagagggccaggaacaaatccaaaacccgcgaccgggaggagaaaaaggagaaagggaaagggaaggccaaaaatgcgggtaaggaaaaggagggtgtgcctgaccgcgagtgtctcgtgatgtga

SEQ ID NO: 3719 - protein, 853 aa, Myceliophthora thermophilia
MEMMKAASSLMPKKFRSVREKNGHRRNKSSEDGGKVRPLTAESWLSIFKSDSGKQSQREKEEVEKESAKVEVIAKRLEELGYHTVTKDIIRLSLRSGYAKGNVEKAVELLQLQQQAFSGIIQPYDPNVEMLGAENRGNVTCYLDSLLFAMFAHLTAFESMLKNDLEGEPQRKLAALLRLWVNMLRSGKLIHTDMLALAECGWKDAALLEQQDTSEAFAFIADALQLPLLALQVDLFHQGKGDADDHKVVHERCLNLPVPPDTEGKGIKLEDCMEAYFNNKVDVLRDSLEENKAADKPTLSPENTIRMVPADGDETPRAEKENTQLQRRWTTHGEIVQSPVSASMSDAVASSRTRSTSIIQRFVVDGKDSNGPATDPETSSLLQRARRTGSNVVKAVTIPAWQFYRLIRESLCAVVPLVGILEANAVFTPPLAAWNASSSSAPSSDMELARHFNQRPVVAICLKRYTMTENGVPIRLNTFIDIPDSLRLPHFMVVDDAKEGQDPNGLSQGYKLVLQSAICHRGESIHSGHYIAYARVAPKLLTDNRRHDHDPPPDYEEPQWVRFDDLAVERRVEPVDDIQECLRRQEEMPYVLIYQIVPMVDVTSASTDGSVTEPPCYVESTTTGPGTPTAEAVSDAGQISRSASGYFDPAATLAHTAPRIRLSSEIERPQRLSFEDDLRSLANQINSSRAGSVTFSEPPLHVNSAVSSEAVSPVATPQEESTGARLSRAAAMFKTGASKSRPTSQASEGRISLTMSRFGFGRQSRESGSNGTAANSEASAIEQGGLAADGEEAAGGKDKDKEQHPFDHNKKEERARNKSKTRDREEKKEKGKGKAKNAGKEKEGVPDRECLVM

SEQ ID NO: 3720 - DNA, 1044 bp, Myceliophthora thermophilia
atggcgaagcaaacaaacctcaaggagttcgaggccgtcttccctaagctggagaaggttctcctcgaacatgccgagcagtacaagctcccgaagcaggtcgtcgactggtacaagaaatccctcgaggtcaacacccttggcggaaagtgcaaccgcggcatgtcggtgccggactcggcgtcgctgctcttggggcgccccctaaccgaggacgagtacttccgggccgcgacgctgggttggatgacggagctgctgcaggccttcttcctggtgtctgacgacatcatggacggcagcatcacgcggcgcggcaagccctgctggtaccgccacgagggcgtcggcatgatcgccatcaacgacgccttcatgctcgagtcggccatctacacgctcctcaagaagttcttccgctcccacccgcgctacgtcgacctgctcgagctgttccacgaggttaccttccagaccgagattggccagctgtgcgacctgctcaccgcccccgaggacgtcgtcaatctcgacaacttcagcatggagaagtaccgcttcatcgtcatctacaagacggcctactacagtttctacctgcccgtcgccctggcgctgtacctgctcgacatcgccacccccgggaacctcaagcaggccgaggatatcctcatcccgctgggcgagtacttccaggtgcaggacgactacctcgacaacttcggcctgcccgagcacatcggcaagatcggcaccgacatccaggacaacaagtgctcgtggctggtcaaccaggcgctggccatcgtgacccccgagcagcgccgcgtgctcgaggagaactacggccgcaaggacaagaccaaggaggccgccgtcaagaagctgtacgacgagctcaagctggagcagcggtacaaggagtacgaggagaaggctgtcggcgacatccgcggcttgatcgacaagatcgacgagtcccagggcctgagaaagggcgtcttcgaggccttcctggccaagatttacaagcgcagcaaataa

SEQ ID NO: 3721 - protein, 347 aa, Myceliophthora thermophilia
MAKQTNLKEFEAVFPKLEKVLLEHAEQYKLPKQVVDWYKKSLEVNTLGGKCNRGMSVPDSASLLLGRPLTEDEYFRAATLGWMTELLQAFFLVSDDIMDGSITRRGKPCWYRHEGVGMIAINDAFMLESAIYTLLKKFFRSHPRYVDLLELFHEVTFQTEIGQLCDLLTAPEDVVNLDNFSMEKYRFIVIYKTAYYSFYLPVALALYLLDIATPGNLKQAEDILIPLGEYFQVQDDYLDNFGLPEHIGKIGTDIQDNKCSWLVNQALAIVTPEQRRVLEENYGRKDKTKEAAVKKLYDELKLEQRYKEYEEKAVGDIRGLIDKIDESQGLRKGVFEAFLAKIYKRSK

SEQ ID NO: 3722 - DNA, 2004 bp, Myceliophthora thermophilia
atggggctctcatccaaagactccctgcaacttagggaggcgctccagacagcagtggtgaagtgctccgagagatgcctctatcagtctgcaaaatgggccgcagaactcctcgatgccctcccagaacccgaccttgacacaatgtcagacgtgccacagagccatatacataccgtcttctcacccaaccccgaccccgtcgaggccgagagagaggctcaggagctcggccggtacctgctcgcaaagtcgtactttgactgcaaggagttcgaccggtgcgccgccgttttcctgcccgagcccctgctggccagcctcttggggaccaacccgaatgaggttgcaaacccaaagggtaagggcaaagccaaggcgaccgctgttgccctctcgtccgaagacaccctgcccgagattagccagaagagcatgttcctagcattgtatgcgaaagtcattgcgggagagaagcagaaggacgaggagaccgagatgatcatggggccccaggactccggctccgtagtcaataagcaactggtggtcgtcagccgcttcctgtccaggtggtttgcccaacggaaggccgacggcggcgactatccccccagccaaggctttctcgagtatctgtacggcatggtcctggcgaaggagaagaatgacaacctagcgttggactatctcatgcagagcgtgcacttgttcccctggaactggggcgcctggctagaaattacaaacctcgtctcgagagtcgagcagctgaacaaaatcgcgcctcacctcccgcaaaacatcatgtctttcatcttccacgccaacgccgcggttaacctctaccagcagggtccggatcttgcgtcttcgctgaatgacctcctcgacatcttcccaacctcttccttcctcttaacctgtaaggcattgctatgttaccattccaaggatttgttcgccgccgaacaggagttcaacaaggtgttggccttgcatccgcaccggctcgactcgctcgatcactactccaatatcttatacgtgctgaaccggcggcccaagctcgccttcctggcccacctctgctccaacattgacaagttccgcccggaatcctgcgtcgtgatcggcaactactattcgttgctctcgctccacgagaaggcggttcagtactttcgccgggctcttacgctggaccgctcctgtctctcggcatggacgctcatgggccacgagttcgtcgagcttaagaacacccatgcggccatagagtcgtatcgccgagcagtcgacgtcaaccggcgagactaccgcgcctggtacgggctcggccagacctacgaggtgctcgagatgcacgcgtacgcgctctggtattacaagaaggcggcgggcctccgaccgtgggactccaagatgtggcaggccgtcggctcctgcctgcaaaagatgggccgggaccgcgacggaatcaaggccctcaagcgcgccctgctggccgatagctactatgacaccacggccgcgagcagcttcggcagcgccggcaccgtcgaccgcacatcccagatggacccggaggtgctgctgcagatcgccaacatgtacgaccggctcggcgaggaggaagaggcgaaagcgtacatggagctgtgcctggcccaggaggaaggagccgcgggcggcgtcgaaggcagcgccggcccctcgctgggcgattcgatcgccatccacaacgactcgccgggctcggatgccgaagccggtgacgggctcgagggccgggccggccccgacggcggaacgggagtgacctttgcgaccagcaaggcacgcatgtggctggcaaagtatgcgatgcgcgccgaagactacgaaacggccaaccggctcgccatggagctgtgccaggacggcgtcgaggtcgaggaggccaaggcgctcatgcgcgaggcccgctcgcggatggagctcgcggagatggtggagcgctag

SEQ ID NO: 3723 - protein, 667 aa, Myceliophthora thermophilia
MGLSSKDSLQLREALQTAVVKCSERCLYQSAKWAAELLDALPEPDLDTMSDVPQSHIHTVFSPNPDPVEAEREAQELGRYLLAKSYFDCKEFDRCAAVFLPEPLLASLLGTNPNEVANPKGKGKAKATAVALSSEDTLPEISQKSMFLALYAKVIAGEKQKDEETEMIMGPQDSGSVVNKQLVVVSRFLSRWFAQRKADGGDYPPSQGFLEYLYGMVLAKEKNDNLALDYLMQSVHLFPWNWGAWLEITNLVSRVEQLNKIAPHLPQNIMSFIFHANAAVNLYQQGPDLASSLNDLLDIFPTSSFLLTCKALLCYHSKDLFAAEQEFNKVLALHPHRLDSLDHYSNILYVLNRRPKLAFLAHLCSNIDKFRPESCVVIGNYYSLLSLHEKAVQYFRRALTLDRSCLSAWTLMGHEFVELKNTHAAIESYRRAVDVNRRDYRAWYGLGQTYEVLEMHAYALWYYKKAAGLRPWDSKMWQAVGSCLQKMGRDRDGIKALKRALLADSYYDTTAASSFGSAGTVDRTSQMDPEVLLQIANMYDRLGEEEEAKAYMELCLAQEEGAAGGVEGSAGPSLGDSIAIHNDSPGSDAEAGDGLEGRAGPDGGTGVTFATSKARMWLAKYAMRAEDYETANRLAMELCQDGVEVEEAKALMREARSRMELAEMVER

SEQ ID NO: 3724 - DNA, 3783 bp, Myceliophthora thermophilia
atgcggcaggagctcgagtgcggcggcccgcagtccgacttcctttcgattgtgggcccatcgtattcgcctgaaaatagaggaaacatatacggattacgcacgcctggcacgcacgcagcagctgagccacggctggatcccggcgcagcgcatgcaacacaacacacaacacttgcagcgctcggcaatggtacctcggtgacggtagcctcagacagctccgcggcacctccgacgatcaaggcccgaacctcgcgcgcacacggcctgaatggtcgcaagcgacctgaagactttgccttgtggccggggagattgggcgaagcatcatgttctcaaaccagggggcgcgcaagtcggtggatagcctgtcgccgaccccgtcggttgggcatcggggcgacttccctttccatgggtatacacacgcccataacccacgagatctggactggactgtatctcgagcttcggctaatactcagaagaacagcgcctctcgggtcccagcgaccaggccagcggagagggtcgactgcaagctccgtccattcgatcggcggctcgctggacgctggggcgagctcgtccgacgccgtattcgaatcgggccagaatgctatatcaaccctcctccagcccccgatagtaaggaccggcctcctcccacacaccgccccgcccgcctcgagtgcccaccggcccccgacctcacgagatatccccccagtggcgctcaccaacatcccgcacgtcgaaccatccgagttcgccccttacctgtcgcaagtcggcgccttgtacgaacaactgcggcggatacagttggatgaggatcaagggacgaacaacacacaccgccgaggcaccaagcccgacgaataccccgaggcgctcgatgaggcccacctgaggcccggcaggcgccccggcttgtcgtcgagacggatgtccacggcgtctctcagctccttatcgtcgatagactcggctccggccccgcggcgctcgagctcacgccccaggagaggacagacacacggacctccgccactctctaccatacccgccgtgtactttgaccaagatttccacctcgagaacccgcgcacgtttgatgtcgtgagtgagcgctctgaggtagtccggccggcaccgggcagcaacgagaagggcgcctcctccaacggtcaggccgctgcgccccgcaaggccctggcaaccaacgcgatcctgcaggagaagctctcgtggtacatggataccgtggagatgcacctcatccagtccatttccaccgcgtccaccaccttcttcaccgccctcggctcgctacgagagctacactcggaggcggcagattcggtggagaggatcagggcgctaaggaaggagctggaagctctcgaccaagaagttgccaccggaggcctcaacctcgtccagcagcgcaggagacgggagaacgtcaaacggcttcacgacgctgttctgcaacttaaagagattgtcgaccgcgtggccgtctgtgagaccctggtcgactcgggccaagttgaccaagccctcgacggcatcgacatgatcgagaatctcatggcaggcgaggcaccaaacaacagcgagatgggtatacgcttgagagacctcagggacgccaccgccctccagagcgtgagcggcgacttggctgccctccatctccgcatcgggaagtcttacgaggccaagttcctagacacgctcctcacagatctcagaacacatgtcgagaaagtgtctccccaagaggttctgatgcgttggagcaacgcctcggcacgtacccgtggggctcacagtcgcgaaccctccgcccaaccggcctacatgacgggaacgaaggcgatgcgggcagagctcctctccagcctagcgggtctgcaacgtgccaaatatcttacggctgcggctaccgcgtaccgagaagcggcgctacgcgagatcagggccatcatccggaagcatatgcccagctccaacgaagatgataatgaatcgctcatgtcaacatccactaggacgggaggcaagcagcgctcgcagcaggagaggtcgatcatgctggcccgcaacttgcgcgctctggaaccgcaggatgccgagcagctgctgatcaacatatacatcggcgtgtccgaagcgctgagaagactgggcacccaagccaaggttctcttagatgttgcgagctccattggcgagcccgggggggcgcctcccggagcccgatctccgctccagtcaccccctttcagccccaccccgaggcaagcatcaggcgctgctcaagaagcccaggaggagatccacttggccgtggacattgcgaatcttctcgggcaggcggtagacgtggcacaagagaagatcgtcaaggtgttgcgcgtgcgctcagagcagagcaagcggttggatctcctttggttcctccgctatttcacactcaacctccactttgccaacgagtgcgaggccatctcggggcgcagcggcaccactctgaagacggtcgtcaacgggcacatcaaggactttattcaataccatggcgacgcagagaatcaaaagcttgcccagggaatggagtcagaccagtggaattccgctgactttggcgacaaagacaccgaagtgctcaatcagcttctggagagcagcaccaaggacgccgccgcgtgggtggaggggactcaagtctggcttccgcatcccgactcgcaaaagccgggcgaagaggccgaccctttgacgacgcagaccaatggctccagcaagacaaaaacaaggagcgccgtgatcgactcggaacatttcctgcttcccaactcggccatatcgtgcatgcacggcatggcccgtttcttgcagctcatgaccgcgataccgtccatgacgagcgaagtatccacatcgctcatctcgtatctccagctcttcaactcacgctgcacccaactcatcctcggcgccggagcgacacgctcggccgggctcaagaacatcacgacgaaacatctcgccctagcatcgcaagccctcgccttcatcgccaccatcatcccacacgtccgcgagttcgtccgacgacactgcggttcggtgacggcggcgccgggagtcatgggcgagttcgataaggtcaggcgggcgttccaggaacaccagaacaacatctacgacaagcttgtcgagatcatgagtgggcgggcgctggccggtactaagaaactcaaggcggtaaattgggagcagccatccaacagcgtggccaacgagtacatggagacactggtcaaggagaccaccacgcttcaccgcaacctgacaaagcatctgcccgaggacaccgtgaggatgatcatgatgcccgtgttccggaactacaaagacacgttcggcgcggcatatcgggggttggagctcaagtcagagcaagcccgtgcaaggatgcttcaagatatcgagtacttcaagtctcggctgggcaaaatcgacggtttcgaggacgcgggtgaccatctggttagcgtcatcaagaagatgactgctcctcccccacctccaacacccgaacccgcatcgcaatcgccgccagcaacggaaactccaaacggaggagaggaaggaaagaaaccggcaggagaaggtcagcctccgaatccacaaccccaagcaagcacggcagcagcacaggcagagaagaagggagagggcaacgatgcaagcacggcagcgtaa

SEQ ID NO: 3725 - protein, 1260 aa, Myceliophthora thermophilia
MRQELECGGPQSDFLSIVGPSYSPENRGNIYGLRTPGTHAAAEPRLDPGAAHATQHTTLAALGNGTSVTVASDSSAAPPTIKARTSRAHGLNGRKRPEDFALWPGRLGEASCSQTRGRASRWIACRRPRRLGIGATSLSMGIHTPITHEIWTGLYLELRLILRRTAPLGSQRPGQRRGSTASSVHSIGGSLDAGASSSDAVFESGQNAISTLLQPPIVRTGLLPHTAPPASSAHRPPTSRDIPPVALTNIPHVEPSEFAPYLSQVGALYEQLRRIQLDEDQGTNNTHRRGTKPDEYPEALDEAHLRPGRRPGLSSRRMSTASLSSLSSIDSAPAPRRSSSRPRRGQTHGPPPLSTIPAVYFDQDFHLENPRTFDVVSERSEVVRPAPGSNEKGASSNGQAAAPRKALATNAILQEKLSWYMDTVEMHLIQSISTASTTFFTALGSLRELHSEAADSVERIRALRKELEALDQEVATGGLNLVQQRRRRENVKRLHDAVLQLKEIVDRVAVCETLVDSGQVDQALDGIDMIENLMAGEAPNNSEMGIRLRDLRDATALQSVSGDLAALHLRIGKSYEAKFLDTLLTDLRTHVEKVSPQEVLMRWSNASARTRGAHSREPSAQPAYMTGTKAMRAELLSSLAGLQRAKYLTAAATAYREAALREIRAIIRKHMPSSNEDDNESLMSTSTRTGGKQRSQQERSIMLARNLRALEPQDAEQLLINIYIGVSEALRRLGTQAKVLLDVASSIGEPGGAPPGARSPLQSPPFSPTPRQASGAAQEAQEEIHLAVDIANLLGQAVDVAQEKIVKVLRVRSEQSKRLDLLWFLRYFTLNLHFANECEAISGRSGTTLKTVVNGHIKDFIQYHGDAENQKLAQGMESDQWNSADFGDKDTEVLNQLLESSTKDAAAWVEGTQVWLPHPDSQKPGEEADPLTTQTNGSSKTKTRSAVIDSEHFLLPNSAISCMHGMARFLQLMTAIPSMTSEVSTSLISYLQLFNSRCTQLILGAGATRSAGLKNITTKHLALASQALAFIATIIPHVREFVRRHCGSVTAAPGVMGEFDKVRRAFQEHQNNIYDKLVEIMSGRALAGTKKLKAVNWEQPSNSVANEYMETLVKETTTLHRNLTKHLPEDTVRMIMMPVFRNYKDTFGAAYRGLELKSEQARARMLQDIEYFKSRLGKIDGFEDAGDHLVSVIKKMTAPPPPPTPEPASQSPPATETPNGGEEGKKPAGEGQPPNPQPQASTAAAQAEKKGEGNDASTAA

SEQ ID NO: 3726 - DNA, 687 bp, Myceliophthora thermophilia
atgacagaagcaggcggttccccggcggccgacgaggtcaaaccatacaagattcacgtaagaccgcgtttttctcccgccgttagaaccgcacagctgctcagacaccattggtttgtggccctcgtctcccgcctgcccagtttcccacgggtctcgttcccaggctcatatgcccatcaccgcaggctagaatcctactcctggcgcgacaccgagctaatctcgctggtgaatctgatgtggctacccggtccggaagggatgctccggttctgggcggcttgcgacaagcattgggaggaggacgatgatgacgaggacggttttgccaaggggtggaagccgaacgtggccatcaccgtatttacggggtccagcgactatgccggacggacaagagacgggtttgtggccgacatcagaggaggttgcgagcagggaggtgtgctattgcccgccgccatgggcactgtcccctatttgaggtcgtccatacccagcgaattatccagagagacaagcggcttgcttgcctttgaacagcccgatgctcttctcgctggtgtgcgggggctggcggaagcagttctggctaaggaaccacggctggcaacggcggcgcgatcgcaagcaactggcacgacagcagctgggccaagccagttgcccgcggagagggcctga

SEQ ID NO: 3727 - protein, 228 aa, Myceliophthora thermophilia
MTEAGGSPAADEVKPYKIHVRPRFSPAVRTAQLLRHHWFVALVSRLPSFPRVSFPGSYAHHRRLESYSWRDTELISLVNLMWLPGPEGMLRFWAACDKHWEEDDDDEDGFAKGWKPNVAITVFTGSSDYAGRTRDGFVADIRGGCEQGGVLLPAAMGTVPYLRSSIPSELSRETSGLLAFEQPDALLAGVRGLAEAVLAKEPRLATAARSQATGTTAAGPSQLPAERA

SEQ ID NO: 3728 - DNA, 597 bp, Myceliophthora thermophilia
atgtcctcgcgaaggccgccgaggggcgagtacatcgagacagagacgggcaacaaagtggctcgcaaggccacgctcgtcggcacgcagaacatcatgctcggcggcaagacggtcatccagcccgaggtcctgatccgcggcgacctgatccggaccatccaggcgtccgcgcagtccgcgaccggcgccgctcccaacaacacggccgtgtcaatcggccgctactgcttcctcagccggggctgctgtctgcgacctccgggtcgcctctacaagggcgcattcacatttatgcccctccgcatgggcgaccacgtctttgtcggcccgggcgccgtagtgcaggccgcctcgattgggagccacgtccacatcggcagccaagcggtcattggcgagttcgccatcatcaaggattacgtgcgcatactcgacggcacagtcgtaccccccaacatggtgatacccagcttcagcatcgtcgccggccagcccgcgaggctcattggagaagttcctgagggcggccacgaagccttcgagctgcgcgatctctacaagacggtcggaaacaatcctcagccggcatcatga

SEQ ID NO: 3729 - protein, 198 aa, Myceliophthora thermophilia
MSSRRPPRGEYIETETGNKVARKATLVGTQNIMLGGKTVIQPEVLIRGDLIRTIQASAQSATGAAPNNTAVSIGRYCFLSRGCCLRPPGRLYKGAFTFMPLRMGDHVFVGPGAVVQAASIGSHVHIGSQAVIGEFAIIKDYVRILDGTVVPPNMVIPSFSIVAGQPARLIGEVPEGGHEAFELRDLYKTVGNNPQPAS

SEQ ID NO: 3730 - DNA, 4050 bp, Myceliophthora thermophilia
atgaccaagcggtccccggccaagtctaccaagcagaaacgccgcggacgggcagcaccccgatcagcaactcgggaacagactcccgacgacgccttgtacgagatccgagacatcctcgacgagaagcttgtgaagggtagattactgtacaaagtagactgggccgataaccccgccaccggcgagcgatacgatccgacctgggagcccgccgagaacgtcacgagagcagctgttgcagactgggagagagaaaagcggcggcgacaaggcattgcgcccgagagctcaagttccaccgccgagaccgacagccagccggtgctacaccccaactggagggcgaagcggaatagggagctctgggacgctgaagacgaggagagggcgtcgaaacgccataggcggtccgtcgactccggctacacttccaccgacggtgaccagtctggtagctgggcgcacgtggagtcagtcccgcaaagaaagggcgagctagtcctcgagatctcgcgccctcccggtttcgacccgtccgaatacctgcgcgtcttctcgtctcagtccgcgctctcctcgcagccagcggacgcggctgcctcccaggaagaggacttgcagcgtgtcgccggcccagtaagccagcggacgattccggattcgcaggacccattcgattccctgaggacccagtctacggcccggtccgccagcgttccaattgaatgcgaacggggaagtgcacaggacccagacgccgagcttcgaatcagccggtctgacctcgacataccctctcgccagcccggagcttctcagcgcgcgagcggtcgctcagaagggctagtcgagacgcacatagagtcggcagcacaaagtcttgcgccccctagcccaaggctccaatcacagctcgcaccacccttggttgatagcccttggaaggagggattcctcacccagccgaacttcgagctatccatctttggggccgaaacacagtcttttcgtgctgtaggaccgcaattcaccagtcaagaaccagttccgtatcaggagcaggacgaaagcagccagcagcacggttcagctttcggggccgatccctctctatctggctccgagaaccaagctgctcaacgcatctctttccactcccataatccaggcctccttacccagaattcgacgactattgctcagagttccgttgacgtggtgcctgataccgtcccgagagcacccaagagaagctcgagatcgccttcgcagcaaccctttccccgccaaaggagcccaggaaacgagagaaactcgccggcaccatttactccccgcatccagagaatggaaggctccggtgaagaagcgccacggctttcggcgcttgagacggttcgccgcatacaggccgaggtttttgggccattgtccggagatccgcctgctggcagcaaccaagaagaacctcaactagcttccccgtcggccatcaatccaccatctgagaactttgcagagcatttggaggcctctgccgtcccacccgactcttcctcgtggcaaccaccccagggggatgctgcccttatgggcggacacgccgagtatgaacagccgcaggagacagtagctcctgcagaccttaccactagcaaccagttaccggatcaagatgtcgaggatacgaccgccgctttcccggaccaacctgatgagtatcccctgaactcgggcgaaaacgagcaggacgaagacgacgacagccacgaagaaggacgccatatcaccgtcacgcttcccatggctgccaacacccgggcgaagtatctcgacacggtttcggagaacaaatcgaccctgatccagttcggagaggtgttttcaaactcgttctcggatgttccagacgcctcgttggtgtcgaaggtcgacgccatctttgaacagttgctcaatctctgcgatctgcccgcctatgacgaagaccttcccgaactaggcaaggtggacatgatgaagcacgccactaatacaaacagcaagttctccttcgtctacgaacttcttcaagagctgagggacatcaacctccggttcctcatcttctctcagcccggtcgagtcttcgaatacctggaagcagtcatctcaacgacagggtgcccgtatacagtcctaggacaagagggccccacggggcagctcgtgcctgcggaaggagcctcagttgttcttgctacagtcgggcaggacttgaccaaagttcagggagttgacgtcgtcatcgcattcgatcacgcagccaggtctgccgaactgccacagacgttgggcttcgagtctacggcaccgatcatcatgtccctcgttgcaatatattccctggaccacatcgaccagcaacttgacctggtcgagcaggaccttgatagcttggaaaggcgcaacgcactcaatgtggcaacggctaccgccatggattacctcaggaatcccgatcggcagaacagcgagccgcacgaagcagccaagaagtttgccgccttcctgaggaacccggaagtcggcttggactgggaaccccatccgcttcctgccgacatctttgagatctggcttagctctcaggagcgcactcaaaatgaaagtcgcactcagtcccatgctcagatgggagccggtgataggaaacgggcgttgagtaaccttgatgaggggatcgctaagcgaccaaggcttctagaatcgcagcaaccgtcccgtaacgcgactccggctaggatgagtgatctgctcaagcagacgctcgcacaccacacagtcgctgggcctgccgtgcaaatggtcgaagtgcccgtggagcagctcgagaagctgtcagccaagattgcggaattagagtcccagctggcaagggagagcgctatcgaggccaagacgcgcgagcattgcctcggcctagagtcacaactacggtcctatgagcgcaccgtccagtcacttcagccaaagtacatggaagctcttcgcgaccgcagcgcattcgaaaaacagtgtcaaaaggcgattgagagagagaaagctgcgaccgcgcgcctcgaggcccagacggccgagattgaggctctgagagagaagaacaagctgctggagtcgaagctcgccgaggcgaataatgccctcgccacttcggccgtgccggaaattgcgagactcgcccaagcggagaaagaccgtgccgaggcccttgccgccgtcgaaaggctggagaaaaaggttcgcatgatacaaagtgaagctgagtacagccgcaaggcgtaccaagatgcgtcgaatgcgcacacggagctcaatcgggaataccgggaactcgagagcgaaatcgacgaatacaagcggcgcgcgagcgagaacctgcgcaagatccaccagatgcacgcccagggagagatggccgagattgctcgccaagtggacgaactccaagcgttgctggagaatcgtgagcgcgagctggagcgtgccaaggaggagctcaaggtgttgaagaacgggcgacgcgagacgcgtcaggctagtgtccctcgcagtccgcggttgggcgtcatgagtccccggcccgcgcgtggtatgggagctggtagcagaggcaccagtcccgcgccaccgattagctctgacgggccaggcatgggcggcggtacagaccccgttcccggcatgacctacttccctcccgccacgaatgccggccgctggggacacctccgagagattcagcagagggaccacgcctggcggaccgagcaggttctccgatcctgggtgaaccgtgtccgcgcagatgagtcgccgactcgtcgtcggcaaaccacggcgcaaaccgccagctacggcgggtcggggtctactactacctgtgctcccttccaatgcacgttggcgagcaaagccggcaccccggctacgtcaacggtgctatctcctagcggctgctcttctgaccacgctacatggggctggacttcgggaaccgataactaa

SEQ ID NO: 3731 - protein, 1349 aa, Myceliophthora thermophilia
MTKRSPAKSTKQKRRGRAAPRSATREQTPDDALYEIRDILDEKLVKGRLLYKVDWADNPATGERYDPTWEPAENVTRAAVADWEREKRRRQGIAPESSSSTAETDSQPVLHPNWRAKRNRELWDAEDEERASKRHRRSVDSGYTSTDGDQSGSWAHVESVPQRKGELVLEISRPPGFDPSEYLRVFSSQSALSSQPADAAASQEEDLQRVAGPVSQRTIPDSQDPFDSLRTQSTARSASVPIECERGSAQDPDAELRISRSDLDIPSRQPGASQRASGRSEGLVETHIESAAQSLAPPSPRLQSQLAPPLVDSPWKEGFLTQPNFELSIFGAETQSFRAVGPQFTSQEPVPYQEQDESSQQHGSAFGADPSLSGSENQAAQRISFHSHNPGLLTQNSTTIAQSSVDVVPDTVPRAPKRSSRSPSQQPFPRQRSPGNERNSPAPFTPRIQRMEGSGEEAPRLSALETVRRIQAEVFGPLSGDPPAGSNQEEPQLASPSAINPPSENFAEHLEASAVPPDSSSWQPPQGDAALMGGHAEYEQPQETVAPADLTTSNQLPDQDVEDTTAAFPDQPDEYPLNSGENEQDEDDDSHEEGRHITVTLPMAANTRAKYLDTVSENKSTLIQFGEVFSNSFSDVPDASLVSKVDAIFEQLLNLCDLPAYDEDLPELGKVDMMKHATNTNSKFSFVYELLQELRDINLRFLIFSQPGRVFEYLEAVISTTGCPYTVLGQEGPTGQLVPAEGASVVLATVGQDLTKVQGVDVVIAFDHAARSAELPQTLGFESTAPIIMSLVAIYSLDHIDQQLDLVEQDLDSLERRNALNVATATAMDYLRNPDRQNSEPHEAAKKFAAFLRNPEVGLDWEPHPLPADIFEIWLSSQERTQNESRTQSHAQMGAGDRKRALSNLDEGIAKRPRLLESQQPSRNATPARMSDLLKQTLAHHTVAGPAVQMVEVPVEQLEKLSAKIAELESQLARESAIEAKTREHCLGLESQLRSYERTVQSLQPKYMEALRDRSAFEKQCQKAIEREKAATARLEAQTAEIEALREKNKLLESKLAEANNALATSAVPEIARLAQAEKDRAEALAAVERLEKKVRMIQSEAEYSRKAYQDASNAHTELNREYRELESEIDEYKRRASENLRKIHQMHAQGEMAEIARQVDELQALLENRERELERAKEELKVLKNGRRETRQASVPRSPRLGVMSPRPARGMGAGSRGTSPAPPISSDGPGMGGGTDPVPGMTYFPPATNAGRWGHLREIQQRDHAWRTEQVLRSWVNRVRADESPTRRRQTTAQTASYGGSGSTTTCAPFQCTLASKAGTPATSTVLSPSGCSSDHATWGWTSGTDN

SEQ ID NO: 3732 - DNA, 2619 bp, Myceliophthora thermophilia
atggccgcgcaaggggtggaggatgtttatgccagccttcttctgacagacacatatttgcctggcgccctggtgctggctcactcgctccgagatgcgggcaccaccaagaagctggccattctggtcaccctagacactgtgtcggtcgaggttgccgtatatgactatatcatccccgtcagtcggattcgaaatgaacaccctgcgaacctagatctcatgaaccgccgagatctccactcggccttcaccaagatcaacctttggaggcagacccagttccgcaagattgtctatgtggacgcagatattgtggcgttccgagcgcctgatgagctcttcgatctcccgcacaccttctctgctgcgcccgatattggctggccggacctgttcaatacgggcctcatggtcttgactccaaacctgggcgattaccacgccttgctggccatggcgcagaagggggtctcgtttgacggcgccgaccaggggctcctgaacatgtacttcaagaacgactacaaccgcctcagcttcagctacaacgtcacgccctcggcccattaccagtaccttcccgcctacagacactttcagtccaccatcagcatggtccacttcatcggcagggaaaagccctggttgcagggcagggacagagcctttggcgactcgcctttcgaccaaatgctgggaaggtggtgggctgtctatgatcggcactatcggagagaggcctctcgaggtgaaccctcacagccagagcagcgggttccggagattgtgcagtatttcgttaagggcgaattccaacctaccgtccgttacgttgttcctgttggcgagcccccaagcgagcagtttggcaactttcaggatcagcaatatcaagctcatgatatgcagcacttgcagcagcaacagcagcggcagcacacgcatcaggcagaggccttttccggcgagcttccacaccaacatcatgaccaaccccatggagctcacgagcaagctcagcagcatcatcctgacttgcaaatgccacgttcgcctaagccgctatcgcatcaacaacaccaggtgtcagaccaccaacgcggccctcaaccgccgtcgcagcctgggccccagccccaagtagaaagtacacccagttgggatgctcagaggcaacccccacccctcgattccaagcccgaggcgatgaacttcccgcaaactcactacgccatgtcgtctgatacggctccgttcgtgccgccagagcggtatcctacccctcccaaaaatatgtggtacgaaatgccaaaggcgcgcccggcgaaaccggaggagaaacccaagcccattttcccctgggagacacaccggccaaaaccgacccgcgtgttcgcttctgtaacacagcttgaggcgccggcgactggcccggcggccaagcacattggcgaggccagtgaacccccacaaggctcgcacatcacccaagcccagccggcggtatcgggttcgtcctcacagtcagccacgcagcaacaaccgggcgaaccacacacgccgccgctgcggcaaccatcgccactacaatcgttgccgccacagccatcgccaccaaagccgtcgccgcccggtccaagccctcgccccgcgcgccccgcgcctgcggcgaccgcaaccgacatttggtcttccttcccgcgaaccaacgcttgggacaacgtgccggaaatcaaccgctacgtcgaccgcgcgctacagaggcaccgccgctcgcgcagtcgaaatctggctttggcggggggcagcggggacggaaaagaagcagctgctgcggtaacagaagagtttggctacgcttttgctccggcaaggaggggttccaaggtgacagatttccccagcgaggacgaccgcccgagccttccggtgacgccggcgccaatccgaaggccgcggcgctggggcagcggtacgggcggcgactttggcggcggcggcggcacgggcgagggaagggaacagctgtcggccgccgagggtgtgccagggcaggctgactgggtatgtgtgcacgggatccggtggactcccgcagactgcctttgcgagctggctaacatccttcgttcctacaaggatcctgcggcgcagctgcagaagctagccaaggagcagtcggagctgttgctgagacggctgggtggcggcggtcgtggtgataatgaaggaaaagaagaagtaggggccgggaaggggtctcagggagagaaggcgcagcggggggagattcccctgcgtccgctgccgttcggatctgaaggcatcaggtccccgacctatgtcgctcccacgcagcctgcggtcgtaagtcccacgccgatcaaaccgcacacgggcacgagcccggtgaacaggttcttggccgcggcgcctgatattgccccttcgcaggagtcctcagccgcgaccggagctcctcaaggtccggtccctgccatcccttcccctagctatcggggccccggggcagcgttcgagaagggcgaggacgtgcctacctttgagacgcccgcgttgccgaccgaggaggagcgggacattcttgagacgtga

SEQ ID NO: 3733 - protein, 872 aa, Myceliophthora thermophilia
MAAQGVEDVYASLLLTDTYLPGALVLAHSLRDAGTTKKLAILVTLDTVSVEVAVYDYIIPVSRIRNEHPANLDLMNRRDLHSAFTKINLWRQTQFRKIVYVDADIVAFRAPDELFDLPHTFSAAPDIGWPDLFNTGLMVLTPNLGDYHALLAMAQKGVSFDGADQGLLNMYFKNDYNRLSFSYNVTPSAHYQYLPAYRHFQSTISMVHFIGREKPWLQGRDRAFGDSPFDQMLGRWWAVYDRHYRREASRGEPSQPEQRVPEIVQYFVKGEFQPTVRYVVPVGEPPSEQFGNFQDQQYQAHDMQHLQQQQQRQHTHQAEAFSGELPHQHHDQPHGAHEQAQQHHPDLQMPRSPKPLSHQQHQVSDHQRGPQPPSQPGPQPQVESTPSWDAQRQPPPLDSKPEAMNFPQTHYAMSSDTAPFVPPERYPTPPKNMWYEMPKARPAKPEEKPKPIFPWETHRPKPTRVFASVTQLEAPATGPAAKHIGEASEPPQGSHITQAQPAVSGSSSQSATQQQPGEPHTPPLRQPSPLQSLPPQPSPPKPSPPGPSPRPARPAPAATATDIWSSFPRTNAWDNVPEINRYVDRALQRHRRSRSRNLALAGGSGDGKEAAAAVTEEFGYAFAPARRGSKVTDFPSEDDRPSLPVTPAPIRRPRRWGSGTGGDFGGGGGTGEGREQLSAAEGVPGQADWVCVHGIRWTPADCLCELANILRSYKDPAAQLQKLAKEQSELLLRRLGGGGRGDNEGKEEVGAGKGSQGEKAQRGEIPLRPLPFGSEGIRSPTYVAPTQPAVVSPTPIKPHTGTSPVNRFLAAAPDIAPSQESSAATGAPQGPVPAIPSPSYRGPGAAFEKGEDVPTFETPALPTEEERDILET

SEQ ID NO: 3734 - DNA, 2505 bp, Myceliophthora thermophilia
atggactcgacccacggtaaggaggctgcatcccattcagtatcacctcgggcgcccctcgttccatgtaccgcaaacgcgactcggctgggctccggcacttcaaagaacccaaatactcataatcacatagatgctctagccctcgccaagcctaggaagcgtcctcgttcacgcggctcaaccgcctcgattcacagcgctacgacccaggccaacgtggagcaaagcttcgccgaatccgcagacgtgtattcttcacaatggcttccgaacggttccagccatccgcgagagctccccaatggatcggcccagatgacgccggaagacctcctcctcgcgtcacagctgcaggcaagccgcgacttcgtacaagacgcccctatgaatgcgccaatgcagaacgtttttttccatcaccatagccacagcatgagccgccaatccttgtccgctgagtccttcgccggaaacacgagctttgcggatgaaagccaaatgctggagcgagatgtcaacgacgacggcgattccttccaagggcacccggcgccagctaagtctagctcgcgatctaatgccaataatgagcttgagatgcggcagctgttcaacagcaacaagcatcgcaccctagaggatgtcgccaaggagctgctcggcaatgatcgtgggcccaattcggagcgcgcacgccaggtctttgcgatgctctggattaatatggtatgctccacaggtaaaggctcggtaccaagagggcgtgtctacgcccactatgcttcccgatgtgccactgagaggattaccgtgttaaaccctgcgagcttcggaaaactggttcgggtgctctttcccggtctaaagacacggcgcctgggcgttcgaggagagtcgaaatatcactacgtgaatttccagctgaaggaggagcagcccgacattcgggatagccccattccacatccggtaccttggccagagaatccatctttgtcacaaaacttcaacaccctgcccgccgccaacgcttcctccacgcaatccgacagagccgcccttcccgcgcctgctggtattcaacaagacgggccaaaggccacgcggtcgcgggattttcaacacagtctttacaatcaaccgcaggtggccagtttcgaccagttgcaatcgacgctgggcaagacgccacagctattgcgcttttcgaccgagacttccgagacattcaagcagacggacgcaatcgtcctccctcgaatcgaaccctaccttccgaatggcacggatcccgacgcggctaagtccctcgtggctctttaccgctcctactgcacatccctcgtcgagtgtatccgctactgcaaggagaaagcgttttttcacctttttacgtcattccagggcacccttaccatgcccgtacagaagctcttcgcaaacccggccattgcgccgtggatagaagaatgcgacttcgtcctctaccagcgcatgatgcgcattgtctcaggattgactctgcaggtcgtgcccaagcccgttctcgacacgctgcgcaacatctcggagcggctcgtaccgcatatccgggaatccttccaagggcagcctctccatgtggtaaaggctaaggaggcgccagctaccatctttgcagggttgctggacagggcattgcgagtcaatctcacagctcatgcagccgcaaatatgttgtcaaaccctgcgaaccgcgatttgatgtatatggagtggatcaccatgatcaacgttcgaaagctggccgagagcatcccgtcgcgcgggatggatgatgtcgtcaatctcctgctcaacgagatgcgagatttgctcaacccggtcaacgtcccatgggagatggagtgcttgacggtacaaggcgagatcgccatgcggaatggcaaggctccacctgagggagataatgaagacgcggagtcgtcgaacgtgctggatcgttgggtgaacctgctccgttcccttccaagccggttcccctacgcgtctgacacggatctcgtctggtgtgttcagaggctgagcacggcgctgatgagagaccttacgatcgggcaagggaagagcttcgggtcatggtgggtaacaaaatgctggatcgacgagatgattcagttcatggcagagcaagggggcttcatgcaacagaagtctacccagagctttaatgcggccccgaagcggcaaacggcaaaccgggagacgagccacaaggggtcacggtatagcagtgccagtgatgattttggcatgccgcgtgtgcccgagtcacaaccggaccgggcgtcgctcccctctgggccggcatccaacacacagcagacaacgcatgacgatagcgggataggcatcaggacgcccgacgaggagctaccaggcgacaaattcagcctcactccggcaactacgcaggacctgtttgccgggacagagttgcaggacgagctgggcgatatataa

SEQ ID NO: 3735 - protein, 834 aa, Myceliophthora thermophilia
MDSTHGKEAASHSVSPRAPLVPCTANATRLGSGTSKNPNTHNHIDALALAKPRKRPRSRGSTASIHSATTQANVEQSFAESADVYSSQWLPNGSSHPRELPNGSAQMTPEDLLLASQLQASRDFVQDAPMNAPMQNVFFHHHSHSMSRQSLSAESFAGNTSFADESQMLERDVNDDGDSFQGHPAPAKSSSRSNANNELEMRQLFNSNKHRTLEDVAKELLGNDRGPNSERARQVFAMLWINMVCSTGKGSVPRGRVYAHYASRCATERITVLNPASFGKLVRVLFPGLKTRRLGVRGESKYHYVNFQLKEEQPDIRDSPIPHPVPWPENPSLSQNFNTLPAANASSTQSDRAALPAPAGIQQDGPKATRSRDFQHSLYNQPQVASFDQLQSTLGKTPQLLRFSTETSETFKQTDAIVLPRIEPYLPNGTDPDAAKSLVALYRSYCTSLVECIRYCKEKAFFHLFTSFQGTLTMPVQKLFANPAIAPWIEECDFVLYQRMMRIVSGLTLQVVPKPVLDTLRNISERLVPHIRESFQGQPLHVVKAKEAPATIFAGLLDRALRVNLTAHAAANMLSNPANRDLMYMEWITMINVRKLAESIPSRGMDDVVNLLLNEMRDLLNPVNVPWEMECLTVQGEIAMRNGKAPPEGDNEDAESSNVLDRWVNLLRSLPSRFPYASDTDLVWCVQRLSTALMRDLTIGQGKSFGSWWVTKCWIDEMIQFMAEQGGFMQQKSTQSFNAAPKRQTANRETSHKGSRYSSASDDFGMPRVPESQPDRASLPSGPASNTQQTTHDDSGIGIRTPDEELPGDKFSLTPATTQDLFAGTELQDELGDI

SEQ ID NO: 3736 - DNA, 264 bp, Myceliophthora thermophilia
atgctggaccacagtaactggcagatcaaacagccagtacaaggcaggacaaagggggcaattgcaggtgtcagtttcatgtccaaaaccatcattgggggtgccataacgcaggcgcaagccacaagcaaccccacaccgcgaccaggggtatggacacaaggtaacgctgtcccccgcggcccaccgaccactgtgaccctgcgcatcggttacgcggctacggaccgcagcagcagcgcccgttccggcacatgcccctag

SEQ ID NO: 3737 - protein, 87 aa, Myceliophthora thermophilia
MLDHSNWQIKQPVQGRTKGAIAGVSFMSKTIIGGAITQAQATSNPTPRPGVWTQGNAVPRGPPTTVTLRIGYAATDRSSSARSGTCP

SEQ ID NO: 3738 - DNA, 4032 bp, Myceliophthora thermophilia
atggaggcgcacgatggcccggcgcgtgacgccggccaacgcctgccgactgagacagacagcggctcgggcttctaccggctggggacgaaccagagcagcgccagcatttttgaggatgtcgagatggctcaagatgagctctttgctggacccgtcgccgagtctctcccgactagcgtctctgctttcagtcaccgccgcgcccgtgccgactcgacaacgagcttctccttctaccaagacgagggtgagcttggcgagcttggggaactggagcaggctgtccctcttgccgacggacgcctctcggtaggcgacctcgacgagctaccattcgacgacgagttcgaagaacaagacgattcaaccgacatggagcgcagctctgtttacgacgaccatgactttctccgcaggacttcgacgcaatcgaggggttcggtttacagcaggctactcaggcgggatagcggcgtttcagctggcagcggctatggggcaacccgccacagccaaaaggtgtacatggtgaacgaggacctttatatcgtcattgcggggtttcggacgagcgttgccgggctcgcgctctacgtttttctctgtctcttcacgtgcggtctcggctggctagtcttccgctggttgcctcgctggcacgttaagctggttggcaaatcgtcgccccttcgcgattgcgattgggtcgtcgtcgagaatcagtggaacgaaatcgcaatattggacgtggagtccaaaccgtatgggcggccactctcgaccgtgttcggagcgccggggaagatgacctcgtacctgtttacggacgaagatcacgacccgattctgcacgaccttcgaatgatcagttatcgttacgtccggtttttcttccatcctacaagagacaaattcctgctcggtgccggatggaaggatcccctgtggtcaaacgtccgagagatccgcgccggcatcacgagcgaagagaagactcaccgcgacgtcgtttttggcgacaatctgatcgatatcgagcagaagtcggtgttccgtctgctcgtggatgaggttttccatcctttttacgtgttccaactagccagtctgatactctggtcacttgacgagtattattactacgctgccgccattttcgtcatatctgtgggcagtatcactaccacacttattgagactagaaataccatgagaaggcttcgcgagatctctcggtttgtctgcgacgttcgagttcttcgcagcgggttctggcggaacattccctcgagcgatcttgtcccgggtgacgtatacgaagtcagtgacccaagcctcggccaatttccagcagacagcctcctcctcagcggcgattgcattgtaaatgagagcatgctcactggtgaatctgtccccgtgtccaagactccggcgaccgatgagacgcttcgaaagctagacttggcagcatcgactatgctcccggacgtagctaagcatttcttgttctgtggcaccaagattgttcgtgctcggcgaccgcaggagaaccaggatgaagaagccgtggcccttgctatggttgtgaggacgggtttcaatactactaagggcgctttagttcgctccatgctcttccccaagccatcgggtttcaaattttacagggactcgttccgatacatagccgtcatggcttgcgtggcgctattcggattcaccgcctcattcatcaatttcattaggctcggactggagtggcatttgattgtcgttcgtgccctcgacctcatcacgattgtggttccgccggccctgccggcgacccttaccatcggcactagcttcgccctcggccggctgaagaagaagcaaatattctgcatcagcccgcagagggtgaacgtgggaggaaagctcgacctcatgtgcttcgacaaaaccgggaccctgacagaggaagggctcgacattctgggggtgcgagttgtttcgcgagccgacaaccgatttagcgagctgttggccagtccccgggaccttgccccggaccagagcgccggtgctgaggacaaagacgagagagacacgcggaccgcaactctatacactatggcaacgtgccattccctgcggaccgtggatggccaccccgttggcgatcccctcgatctgaaaatgtttgaattcacgggctggacttttgaggaagggaatatggggggagcaaatgccgatgatgaagaacaagtaaatctccgtccctctgttgccaggccaccaacggacttcagacaacaagcggacggaataggccaggggtctgtcacaaatgaacccctcgaactcggcgttattaaatctttcgagtttgtctcccagctgcggcgtgctagtgtcattgtgaggacgttcggccggcccagtggtgacatctatgtcaaaggagctcctgaatgcatgcgggatatttgtagaccggagacattccctgccgactacgaagagcttctatctcagtatacacacaaagggtatcgtgttattgggtgcgcaacaaagcacatcaagaagctcagctgggtcaaggcccagaagatgaaacgaagcgaggttgagtcagacctcgagttcgtcggattcatcatcttcgaaaacaagttgaagcctacgacggtcgcggtcctcaaggagctcctcgactctaacattggcaccgttatggttaccggcgacaacattctgactgccgtcagcgtcgcgagggagtgcggcatgatcagcaagactgcgcactgtttcgttcctcggttccttaccggtgacgcaacagaccccaacgcgagcctccagtgggagagcatcgacaaccaggcctaccagctcgacgctaagactctgctgcccctgccagctccgccggaacacgatgcatctttgccatacgacatctcaaacctgcgcaactactcgatcgctgttagcggtgatgtcttccgctgggtagtcgactttgcgccccccgaagttctgcggaggatgctcgtcaccggcaaggtctttgcacgcatgtctccggacgagaagcacgaactagtggagaagctgcagagcattgactattcgtgtggtttctgcggcgacggcgcgaacgactgtggcgccctcaaggcagccgacgtaggcatctccctctcggaagccgaggcgtccgtggcggccccgtttacctctcgggtgtttgacatccgatgcgtgcccgaggtgattcgggagggacgggcggcgcttgtaaccagcttcagctgcttcaagtacatgagcctgtactcggccattcagttcacctcggtgagctttctgtacgcctcggcttccaacctaggcgacttccagtttctcttcatcgacctggccttgatcctgcccattgccgtcttcatgagctgggcaggacctttcccagagctgtgccgcaagaagccgacagcagatctcgtctcgcgcaagattctcactccgcttttgggtcagattgtcatatgcatcgtgatccaagcggccgcatacgtggctgtccgcaagcaaccgtggtttatcccgcccgttatcgaccccgacaagtcgaacgttgtgaactcagagaacacggccttgttcctgacctcttgctttgaatacatcctgtcaggagtggtgctgaatgccggccggcccttcaggcactcggcgttgcacaattggccgtttgtcgcaaccgtagccatcaccctcggcatctcgctggtaatggtgatcagtccgccggcgtggctgtccagcttcatgcaattgacctatctcagctgggacttcaagcttgtgatcatcgggcttggggtactgtactttgttttggggtgggcaggggagcatctagtgttccagggccttgcgcgactgattgggaagctgaaggtgtcggtgttcaagcggaccaaagtgcggaagcagtacaaggtaattcaggagcaaatgttgttttag

SEQ ID NO: 3739 - protein, 1343 aa, Myceliophthora thermophilia
MEAHDGPARDAGQRLPTETDSGSGFYRLGTNQSSASIFEDVEMAQDELFAGPVAESLPTSVSAFSHRRARADSTTSFSFYQDEGELGELGELEQAVPLADGRLSVGDLDELPFDDEFEEQDDSTDMERSSVYDDHDFLRRTSTQSRGSVYSRLLRRDSGVSAGSGYGATRHSQKVYMVNEDLYIVIAGFRTSVAGLALYVFLCLFTCGLGWLVFRWLPRWHVKLVGKSSPLRDCDWVVVENQWNEIAILDVESKPYGRPLSTVFGAPGKMTSYLFTDEDHDPILHDLRMISYRYVRFFFHPTRDKFLLGAGWKDPLWSNVREIRAGITSEEKTHRDVVFGDNLIDIEQKSVFRLLVDEVFHPFYVFQLASLILWSLDEYYYYAAAIFVISVGSITTTLIETRNTMRRLREISRFVCDVRVLRSGFWRNIPSSDLVPGDVYEVSDPSLGQFPADSLLLSGDCIVNESMLTGESVPVSKTPATDETLRKLDLAASTMLPDVAKHFLFCGTKIVRARRPQENQDEEAVALAMVVRTGFNTTKGALVRSMLFPKPSGFKFYRDSFRYIAVMACVALFGFTASFINFIRLGLEWHLIVVRALDLITIVVPPALPATLTIGTSFALGRLKKKQIFCISPQRVNVGGKLDLMCFDKTGTLTEEGLDILGVRVVSRADNRFSELLASPRDLAPDQSAGAEDKDERDTRTATLYTMATCHSLRTVDGHPVGDPLDLKMFEFTGWTFEEGNMGGANADDEEQVNLRPSVARPPTDFRQQADGIGQGSVTNEPLELGVIKSFEFVSQLRRASVIVRTFGRPSGDIYVKGAPECMRDICRPETFPADYEELLSQYTHKGYRVIGCATKHIKKLSWVKAQKMKRSEVESDLEFVGFIIFENKLKPTTVAVLKELLDSNIGTVMVTGDNILTAVSVARECGMISKTAHCFVPRFLTGDATDPNASLQWESIDNQAYQLDAKTLLPLPAPPEHDASLPYDISNLRNYSIAVSGDVFRWVVDFAPPEVLRRMLVTGKVFARMSPDEKHELVEKLQSIDYSCGFCGDGANDCGALKAADVGISLSEAEASVAAPFTSRVFDIRCVPEVIREGRAALVTSFSCFKYMSLYSAIQFTSVSFLYASASNLGDFQFLFIDLALILPIAVFMSWAGPFPELCRKKPTADLVSRKILTPLLGQIVICIVIQAAAYVAVRKQPWFIPPVIDPDKSNVVNSENTALFLTSCFEYILSGVVLNAGRPFRHSALHNWPFVATVAITLGISLVMVISPPAWLSSFMQLTYLSWDFKLVIIGLGVLYFVLGWAGEHLVFQGLARLIGKLKVSVFKRTKVRKQYKVIQEQMLF

SEQ ID NO: 3740 - DNA, 576 bp, Myceliophthora thermophilia
atgacgacccccacagccgcgaaacacattgtcaacttcataacaggcaatgccaacaagctgcgcgaggtgaaggcgatcctggagccggcgatccaagtcgagagccagacgctcgatctggtcgagatccagggcaccctggaagaggtgacgctggacaagtgcaggcgagcggccgagctgatcaagggccccgtcctggttgaagacacctgcctctgcttcaacgccctgaatggacttccggggccgtatataaaatggttcatggcatccatcggtcacgctggtctcaacaacctgctggccgcgtacgaagacaagtcggccaaggccgtctgcacctttgcctactcagcgggtcccggccatgagccgatcctgtttcaggggattaccgagggcaagattgtaccggcaagggggtcgccggattttggctgggatgccattttcgagtacgaagggaaaacgtatgctgagatggacaaggcggaaaagaacaagatctcgcaccgctaccgggccttggcaaagctaaaagattggttcgcaaaggaactggcgccgtaa

SEQ ID NO: 3741 - protein, 191 aa, Myceliophthora thermophilia
MTTPTAAKHIVNFITGNANKLREVKAILEPAIQVESQTLDLVEIQGTLEEVTLDKCRRAAELIKGPVLVEDTCLCFNALNGLPGPYIKWFMASIGHAGLNNLLAAYEDKSAKAVCTFAYSAGPGHEPILFQGITEGKIVPARGSPDFGWDAIFEYEGKTYAEMDKAEKNKISHRYRALAKLKDWFAKELAP

SEQ ID NO: 3742 - DNA, 1338 bp, Myceliophthora thermophilia
atggccgaagacaaggcgatggcctgcccattttgtggctggaccaaccccggtggcgaatatgagatgctgctgcacttggaaacctaccacgccgaaggagaagacgcttcgttccgtcaagagcaaggaagcgtatctgaaaatcccgggtctggtgagaatatctcatacgtcgagtgtccgattgatgggtgtgaagaaattctcccgctccaggagctggattatcatcttgagctccattccgaggagtctggcggttgcaccacgaaagagcttgaccctgtgacacctgcggagccggatcctcactctgggccgtcgagggctcatcgcgcggcgcaacggcatcgacagtcagaccccgggtctgaggtgaatgagcgtcaagggaaacaagcaaaggaagcaaggttaggaaaggcaatcacgatctggaagcgtttgctcaagatccccgtcttcacatccgagggcgtccacatgcgtgccccgctccagaatgaacagcttccgaataagcactccccccacggcaaacggcttggtaaagcacatctcggaaaatacgctcatgagagccgtatgcccgaatggctagtatcgctgctcaagagggaaggccaagtcacgtcgcaaggtgttgtctccgtgctagcggtactgctggaacaaagtccatcgacaaagcacgcttacctctgccatccacgcgtgcaacatgtttccaaactcaagcgcgagggagggttctgcggctaccggaatatccagatgctggcttcgtatatcatagaagtcaagtccaaggggcatgaacatttctgcggcactatcccgtccatctttcagatccaagaatggattgagacagcttgggatttgggcatcaattcacaagcacgccttgagactggcgcccaccaggcagtggctgtgttccggttgttgaacattccatgtgaaccacacggtatcaaattctcggagcctggcaaatccgaggcgcatctcatggagtatgtcgagaattacttcgaattgggggttcaggatcccacgcagcgtgttcacagaacaaacctaccgccgatctactttcaacaccttggccattcccttaccatcatcggctttgagaagctcaagaatggcactaagcagctcctcgtcttcgatccgtcgttccatgactcgtcatacatcgtacgtcttataggccagaccagtttcaagcatcccgcccctgatctggcgctcagggcgtaccggcggggaaacgactatttgaagaggtacagatcttttgagttggtgaagctggtgccaccgtag

SEQ ID NO: 3743 - protein, 445 aa, Myceliophthora thermophilia
MAEDKAMACPFCGWTNPGGEYEMLLHLETYHAEGEDASFRQEQGSVSENPGSGENISYVECPIDGCEEILPLQELDYHLELHSEESGGCTTKELDPVTPAEPDPHSGPSRAHRAAQRHRQSDPGSEVNERQGKQAKEARLGKAITIWKRLLKIPVFTSEGVHMRAPLQNEQLPNKHSPHGKRLGKAHLGKYAHESRMPEWLVSLLKREGQVTSQGVVSVLAVLLEQSPSTKHAYLCHPRVQHVSKLKREGGFCGYRNIQMLASYIIEVKSKGHEHFCGTIPSIFQIQEWIETAWDLGINSQARLETGAHQAVAVFRLLNIPCEPHGIKFSEPGKSEAHLMEYVENYFELGVQDPTQRVHRTNLPPIYFQHLGHSLTIIGFEKLKNGTKQLLVFDPSFHDSSYIVRLIGQTSFKHPAPDLALRAYRRGNDYLKRYRSFELVKLVPP

SEQ ID NO: 3744 - DNA, 1599 bp, Myceliophthora thermophilia
atggcatccggtttagaagacgtaaaggaggcgttgaaagtcatctccctcggccaggagaagctgctatccgcagtcgagagcgtctcgcagcgtgttgcagagctggagaaggctcaggaggaagaccgtcggcgaccggacactgcaggaaccgatggtctcaagcgaacgttgacgccgcttgccggcggcttcaccccctcgccctcgacggtgctgccggccgaggcgggcacccaatcttctcccatgtcctcgacgtcccccgagctgaaatccagcttctcgtcccgcgtcgtcctcacgacgtatcccaagcagatcggcatcaagccgctgccgttggagtggggtgctgcagacccgctgcagcgtggcccggtgacggtgtctaggtcgccatccaccattggcagacgcaacgccatcggcgctcacggcggttcctattccatctactatgcccttgctctggccagcagagagctcaaggcggaccacaagccggactataccaacaccgagccggccgtgaacattggtccctttccccaatggggcgacaagaaaaagattgtggcaatggacccttggggccacctggtgccctgggtcttccgcgatatcatcgagaaggagaacggcatgtgcacaccattgaagccccttcgtctgcccgcaaggctaacaaaccccgcgatagtggatctccgaccgaccattgccatcaccaaggcgcacatgaagttgcccgagctcgaggagagcgttaagagcggacgcttggtccctgacggcaaggtgtgcctcaacgatcaaggcgagctcaacgtgaccaagttcgccgtcgagcccgtctggtatctcccgggggtcgcagagcggttcggcatcgatgagggcaccctgcgaagatcgctctttgaacacacaggcggcatgtatccagagttgataacccgctccgatatcaaagtcttcctcccccctattggcggtttgacggtttactgctttggagatcccgcgaggatgtcggatccttccaagaggcttgcgttgcgcatccacgacgaggcaagtttctttttgtgcaacggaagcgacgtcttcggctcggacatctgcacgtgcaggccgtacctgatattcggcattgaggaggccgtcaaagaggcccaaaacggcggcagtggtgtcgtcatctacttccggaaggaaggccgagctctggtcgtgtacaatgcccggaagcgtggggaagatcgcgcatcggactacttcaagcggaccgagaacatcgcgggggtcaaggacatgcgattccaggccctaatgcccgatatcctgcactggctgggcatcaccaagattgacagaatgctcagcatgagcaacatgaaacacgatgctattgtcgggcaaggcatcccaatctacgagcgagttgagcttccggagtcgtggatccccgccgattcgagggttgagatcgatgccaagatcaacgccgggtatttcacgacaggccaccggatgaccgaggaggaactcaagagcgtgcagggccggatttgggaggatattgaccactaa

SEQ ID NO: 3745 - protein, 532 aa, Myceliophthora thermophilia
MASGLEDVKEALKVISLGQEKLLSAVESVSQRVAELEKAQEEDRRRPDTAGTDGLKRTLTPLAGGFTPSPSTVLPAEAGTQSSPMSSTSPELKSSFSSRVVLTTYPKQIGIKPLPLEWGAADPLQRGPVTVSRSPSTIGRRNAIGAHGGSYSIYYALALASRELKADHKPDYTNTEPAVNIGPFPQWGDKKKIVAMDPWGHLVPWVFRDIIEKENGMCTPLKPLRLPARLTNPAIVDLRPTIAITKAHMKLPELEESVKSGRLVPDGKVCLNDQGELNVTKFAVEPVWYLPGVAERFGIDEGTLRRSLFEHTGGMYPELITRSDIKVFLPPIGGLTVYCFGDPARMSDPSKRLALRIHDEASFFLCNGSDVFGSDICTCRPYLIFGIEEAVKEAQNGGSGVVIYFRKEGRALVVYNARKRGEDRASDYFKRTENIAGVKDMRFQALMPDILHWLGITKIDRMLSMSNMKHDAIVGQGIPIYERVELPESWIPADSRVEIDAKINAGYFTTGHRMTEEELKSVQGRIWEDIDH

SEQ ID NO: 3746 - DNA, 594 bp, Myceliophthora thermophilia
atggcgaaagggaccatttccaaaggcaagagaggcccctcaatacactcccgcgccgccaggcgtgcaatctcccctagcatcgacaccgacaagtctctaaagaacgtccggccgccgcaagaatccgtcgaccggcggccggcggtgctcgcggcgcgccaggccggtggcgctatcaagaaggccaagtcgggccggaaggcggtgctgagctcgaaggcgcggcggcgacgcgagcagagcatgagccgcgccgaggccatcatggaccgcaccgcggtcaaggtccagaagagcaagggccacgccaaggtcatccactcgcggaagaagacgtgggacgagatcaacaaggaggccttcgagctgacggaggagcaacgcaagctgctgagcaagaaggcgagggccaagatggaggaggacgccatggtggaggctttttatgcggacgatggagacgccgagatggagggggctgacgatcttgggcagacacctggcacttcagaagcttctgccgcaccggccgtgtcggcgccggttgcgacggctgaagggggcgaggaagaggaggaggagatcttgtga

SEQ ID NO: 3747 - protein, 197 aa, Myceliophthora thermophilia
MAKGTISKGKRGPSIHSRAARRAISPSIDTDKSLKNVRPPQESVDRRPAVLAARQAGGAIKKAKSGRKAVLSSKARRRREQSMSRAEAIMDRTAVKVQKSKGHAKVIHSRKKTWDEINKEAFELTEEQRKLLSKKARAKMEEDAMVEAFYADDGDAEMEGADDLGQTPGTSEASAAPAVSAPVATAEGGEEEEEEIL

SEQ ID NO: 3748 - DNA, 2970 bp, Myceliophthora thermophilia
atgcctgctgctctcgagccctctgctacggccgcttcgggcgaacagcagatagtcgcgcctcctgcccctagaaagttcaaggcatccgacctgccgctgccctcagcgacgcggacggccatcgaagggctcgcacacgccttcaagaaaaagggcggctacgacgccatccggaaacaagtgtgggagaagtttgaagccagtgtatacaggtctgacaccgcctgggttgctaaggttgctaacgcgcgagaccaggactacgaagcccaagtcacccaagccattctcgaagtcgccgagcaggaggtcgagcgcaatcccacgcagctgctaactctcgagcgaggaaaagccgctgcccttattgatggcgcgctcgaccgcgggggcgtctaccagaaggcggaggagctcatcagcgcgctgatcgacagccgcgccatcgaggagcacattcgccaactacggcgcgccgaaatcggggacgaagccgccgagcaagagcgcatccgtggcgccaagacagacgaggaatatgccgccgaaacggccgcccgccgggccgagcgggaacgtgtccgggccgagctgaaggcggttgaggagaagaagcgacaactcgagcgtgagatcaaggcgagggaagatgccaagaggcgcgaggccgagaggatcgctcgggaagaacggaggaaaaaggagcgcgaggaagatgagcggagggaaaaggaacgccgcgaacgccgcgagaaggagagagaactggaaagggagcgcgagaaggagcgtgagcgtgagcgtgagcgtgagcatgagagccgaagagagagggaacggagccgcgattgggatagagatcgtgaccgcgaccgcgaccgagatcgcgaccgagatcatgaccgagatcgtgaccaccgtgatcgcgaccgggatcgggatcgggatcgggatcgggaccgcgaccgagatcgtggtcgtgatcgtgatagggatcgtgaccgagatcgtgagcggtacggtgaacgaggttatgacagctaccgaggtactccaagagatcgttcaagggatagggaccgtggaagagagagggatagggagagggatagagagagggaccaaacgcgggatcgacgagatagccgcgagagcagagcgaaaccgtccatcgatggccgaacggacgaggttgaaaagaagctcagcaaggaggaccacgaacggctcgaacaggaagctctggctgaccttcttcgggagagcaagcgcgttgccaccaagcagcccgagttggaggttgatgagacacttgttcctcccccaaagaaagcaaagccggcctctgcgattaccccgatccagcgcccggcgacaaagctttccgagcccaaggctgtggaggctaagacgtccgcattagactcgaaaaaacccacggattctaaagacacaaaagagtcgagcaataccaagctatccaccgcttctaaggattccgaggcgaagcccgagagaggtcggactaggagtccttcccgcgattcacgggcccaccgcggcagagatagaagccggtccaagagcgttgaccgcagacggagggatgctcgctcgcgctcgcgctcgcgcactcctcggccccgcgaccgtagccgctctcggcggaggagccggtcaaggttccgcgacaggagagctgaacggaaagacgattatcgggacgaccgccgtgacgagtaccgccacagtcgtcgcgacgactcccgctcgacaaggagagatgaccgcaaggaagatcgaagatacgattacagagaccggagcaggtctcgcgacagggctgaccggcgggagcggagccgttcccgtctcaggtcggcgaggatcgacgacaggagggataggagccgctctcgccgccgtgatcctcgcgaccgcagtcgctcaccgcgcccaagaaccgaacggcgggatcgctctcgctcccgcctgcgattcggccgcagggatagaagccgctcccgatccagggaccgtgattatcgtgacagacgagaacgcagtcgttctcgcgctcgcagcgaccgagatcgcagccgtgaccgcaaccgcgagaaagacaggatcaaagaggaagatagggagcgacgacgcaggagccgctcccggtctgcgcggcccccttcccgcatgagccacactgacatggaagcgtggaaacaagccgaggtgaaaaagcgcgaacaggaagctaaggcctacctggcggcccagaaagaggctagggagaaggggctcccggtgcccggcgcgacccagaggaacatgatcgatacttacctggcgaccgagatcgccaccgagaccgggaccaagagcgcgaccgcatggactaccgaggcggcgatcgttatgacggcgaccgcgatcggccgcgagacagaaatcgggaccgggaccgggaccgggaccgggaccgcgacaggcgcgaccgttcacgcgatcgcgatggagaccgcgcaagagacgaccgtcgaggcacaagacgccacagccggtcgagaagccgtgagcgcgatagggacaggtcaagagacagaagtcgtgaccgtgaccgtgaccgtgaccgagatcgggacagccactatcgccgcagccggcgcgagcgcagtgtgtcttctcggcgcgatagagattgggaccgggaccgggaccgagaccgagatcgtgaccgagatcgtgaccgtgatcgtgatcgggatcgagaccgagatcgagaaagagatcgagatcgggaccgagagcgtgagcgtgatcatgggcggactcgacacgacagccggacacggagcagaagtcgtggctagaagctacgatttggctgacgacccaggcctgtcacactcgccgaatctgccgcaggcggagaaagcagctcgtcttaccacgccaatgcgtaattaa

SEQ ID NO: 3749 - protein, 989 aa, Myceliophthora thermophilia
MPAALEPSATAASGEQQIVAPPAPRKFKASDLPLPSATRTAIEGLAHAFKKKGGYDAIRKQVWEKFEASVYRSDTAWVAKVANARDQDYEAQVTQAILEVAEQEVERNPTQLLTLERGKAAALIDGALDRGGVYQKAEELISALIDSRAIEEHIRQLRRAEIGDEAAEQERIRGAKTDEEYAAETAARRAERERVRAELKAVEEKKRQLEREIKAREDAKRREAERIAREERRKKEREEDERREKERRERREKERELEREREKEREREREREHESRRERERSRDWDRDRDRDRDRDRDRDHDRDRDHRDRDRDRDRDRDRDRDRDRGRDRDRDRDRDRERYGERGYDSYRGTPRDRSRDRDRGRERDRERDRERDQTRDRRDSRESRAKPSIDGRTDEVEKKLSKEDHERLEQEALADLLRESKRVATKQPELEVDETLVPPPKKAKPASAITPIQRPATKLSEPKAVEAKTSALDSKKPTDSKDTKESSNTKLSTASKDSEAKPERGRTRSPSRDSRAHRGRDRSRSKSVDRRRRDARSRSRSRTPRPRDRSRSRRRSRSRFRDRRAERKDDYRDDRRDEYRHSRRDDSRSTRRDDRKEDRRYDYRDRSRSRDRADRRERSRSRLRSARIDDRRDRSRSRRRDPRDRSRSPRPRTERRDRSRSRLRFGRRDRSRSRSRDRDYRDRRERSRSRARSDRDRSRDRNREKDRIKEEDRERRRRSRSRSARPPSRMSHTDMEAWKQAEVKKREQEAKAYLAAQKEAREKGLPVPGATQRNMIDTYLATEIATETGTKSATAWTTEAAIVMTATAIGRETEIGTGTGTGTGTATGATVHAIAMETAQETTVEAQDATAGREAVSAIGTGQETEVVTVTVTVTEIGTATIAAAGASAVCLLGAIEIGTGTGTETEIVTEIVTVIVIGIETEIEKEIEIGTESVSVIMGGLDTTAGHGAEVVARSYDLADDPGLSHSPNLPQAEKAARLTTPMRN

SEQ ID NO: 3750 - DNA, 1401 bp, Myceliophthora thermophilia
atgcccgccgagaacaacggaccccccagtaacggggctccgagcggaagcgcagccccggccgcacgagatggaactgagaacgcgccagcatcggccaagtcaacggcccctcccgccgacacagaaaaactcacgccggcccagctgaaagccaaggcaaaggcagagaaggcagcgaggcgtgcgcaggtgaaagaagccagggccgctgctcaatcggcatcacctgccggagacagaggcgccgccgcagatgcgaagggaggcaagagcaaagggaaacaggatgggcagcagccccagggcaagggcgggcatttgcaggtgcatcgcccgtcagtcagcgggcggcggccatcttcgcccatgacagagaaggatgttaggagcgccatccccgactgtttcagccatgtgccaatggcaaagcggatatcgacatcccaggcgcacaaggatgtgcaccccgccgtgctggccgtcggacagcagatggccacatttgcccttaacgatagcatctcccgcctcaaggcaactcttttggcgttcaggaaggttatcgagtcgtacgaaacgccaaagggaaactcattgtctcgtcacttcgtcccgcacgtcctcaacccccagattgaatacctcaccgagtgcaggccaatgtgctttgctatgggcaatgccatcaggctgttgaagggcaaagtcaacaagttcgatatcgacacggccgaggacgaagcgaaggaaggtctcctggagtggatcgactttttgatcaaggagcgaatcacgctggccgaatacgccattgctcggaacgctgctcagtcgatcaacgagggcgacaccatcctgacctacggcaggcatcggctcgtcgagaagacgttgctcgaagcaaaacgcgacggcaagtcgtttgacgtgacggtgattgacgacccttttcagcgcggcggcctggaactggcaaagacactgcggcaggccggcattccggtactctactccccaaacctgggcggcctacggcccaaggtggccgcggcgtccaacgtcttcctgggaggagaggctatctttgccaacggttcactccatgcgccgtcggggacggccgacgtagccatggccgccacgaacgccggcgtcaaggtgatcgttctttgcgagacgatcaatttcgaccgcgaccgtgtctcggttgattcgctcacgtacaatgagattgaccctgagaggaacacggctgattctttccggttgctgtttgacaacacccatgacaagtacatcaccggcgtcatcaccgagtttgaaagcggaggcggcaactcgccagctcaggccattttggccttgctaaggaagcaggaagaccctctgattgattga

SEQ ID NO: 3751 - protein, 466 aa, Myceliophthora thermophilia
MPAENNGPPSNGAPSGSAAPAARDGTENAPASAKSTAPPADTEKLTPAQLKAKAKAEKAARRAQVKEARAAAQSASPAGDRGAAADAKGGKSKGKQDGQQPQGKGGHLQVHRPSVSGRRPSSPMTEKDVRSAIPDCFSHVPMAKRISTSQAHKDVHPAVLAVGQQMATFALNDSISRLKATLLAFRKVIESYETPKGNSLSRHFVPHVLNPQIEYLTECRPMCFAMGNAIRLLKGKVNKFDIDTAEDEAKEGLLEWIDFLIKERITLAEYAIARNAAQSINEGDTILTYGRHRLVEKTLLEAKRDGKSFDVTVIDDPFQRGGLELAKTLRQAGIPVLYSPNLGGLRPKVAAASNVFLGGEAIFANGSLHAPSGTADVAMAATNAGVKVIVLCETINFDRDRVSVDSLTYNEIDPERNTADSFRLLFDNTHDKYITGVITEFESGGGNSPAQAILALLRKQEDPLID

SEQ ID NO: 3752 - DNA, 999 bp, Myceliophthora thermophilia
atgactgtcgccaacggcactgccaatggcgccgccagcggcagcagccaggccactcggaggcccctgccatgcggcatctacgcgcccaccatgaccttcttcgacccggaaaccgaagacctcgacatcccgaccatcaagaagcacgcggagcgcctcgtgagggacggcctcgtgggcctcgtcaccatgggctccaacggcgaggcggtccactgcacgcgggaggagaagctggcggtgacccgggcgacaagagaggcgctcgacgccgccggcttcacgcagacgcccatcatcatcggcgccaccgaaggcagcgtccggggcaccgtcgagctgtgcaagctcgcccgggacgcgggggccgactacgccctcctgctgccgccgtcctacttccgcttcctgatggacgaggaggccgtgcacgactacttcgtcgccgtggccgacgagagcccgctcccgctcatcctgtacaactaccccggcgccgtggccggcatcgacatggactcggacctcctcatccgcctcgcccagcaccccaacatcgtcggcaccaagttcacgtgcggcaacacgggcaagctgacccgcgtcgccctcgccaccgacgccaagacgccctcctccgaagggtccggctacatggccttcggcggcatgtgcgacttcaccgtccagaccctcgccagcggcggcagcggcatcatcgccggcggcgccaacgtcatgcccaaggtctgcgtgcgcgtctgggacctctacgccgccggcaagaccgacgacgccatcgccctccagcgcgtcctctcccgcggcgactgggtcctcaccaagtcggccatcgccggcaccaagtcggccatccagtcctactttggctacggcggctacccgcgccggccgctgaagcggctcgacaaggcccgggtggccgccatcgaggaagggctgagggaggtgatggagatcgagaagtcgttatga

SEQ ID NO: 3753 - protein, 332 aa, Myceliophthora thermophilia
MTVANGTANGAASGSSQATRRPLPCGIYAPTMTFFDPETEDLDIPTIKKHAERLVRDGLVGLVTMGSNGEAVHCTREEKLAVTRATREALDAAGFTQTPIIIGATEGSVRGTVELCKLARDAGADYALLLPPSYFRFLMDEEAVHDYFVAVADESPLPLILYNYPGAVAGIDMDSDLLIRLAQHPNIVGTKFTCGNTGKLTRVALATDAKTPSSEGSGYMAFGGMCDFTVQTLASGGSGIIAGGANVMPKVCVRVWDLYAAGKTDDAIALQRVLSRGDWVLTKSAIAGTKSAIQSYFGYGGYPRRPLKRLDKARVAAIEEGLREVMEIEKSL

SEQ ID NO: 3754 - DNA, 888 bp, Myceliophthora thermophilia
atgtgggaggacttcgaattcgaccctgaacggatcccaactttcaagttggttttccattcgctccagatcgtcttcggcttcgtgtcgtggtgtctcgagattgccgttttcagggccgacaagtcaaggatcgtgggcgacaatgggtggacctttggagtgttcttcctctcgatcccggcctggatatacctgatcatggccccgcggttcccacgcacgcgcaagatcgccgagcctcacgccatgctggtggtcgacaccctttacaccatcatctggctctcggccttctctacccaggccgcatacaactctaagaatctttgtggcaccgcctgcagcgtcagcaaggccgttgtcgcaatggcagtctttgtatttctctttttctgcgtgaccaccttcttaagcgtctggaccctcaagtactaccaatggaaccaccgcctgccgggctacgaccgcgcgcagctcagcagccagaacatcgacccggacaaggccgccttctcgctggcgccgcacgacgaggaggcctacgcgcccgtcaacatggacgaccacgatcacgacgaccacgtcgacgggtcgcactacggcggcgctggcagcgtcgtcggcgggcgctccgactactcggacccgtacggccccggcacagccggccacgtcggcggtgccagcacggtcagcagctaccacgacaacccgttccgccggcaggaggcgaacccgttcgacggccaggatacagaataccattccggaagcctgtctgccgcttcggggcggtatgccgcggcccctgcggcgccggcggcggatgggtttgaggatgcaaggttccctcaagcagactacgatcggatcggaaggccatga

SEQ ID NO: 3755 - protein, 295 aa, Myceliophthora thermophilia
MWEDFEFDPERIPTFKLVFHSLQIVFGFVSWCLEIAVFRADKSRIVGDNGWTFGVFFLSIPAWIYLIMAPRFPRTRKIAEPHAMLVVDTLYTIIWLSAFSTQAAYNSKNLCGTACSVSKAVVAMAVFVFLFFCVTTFLSVWTLKYYQWNHRLPGYDRAQLSSQNIDPDKAAFSLAPHDEEAYAPVNMDDHDHDDHVDGSHYGGAGSVVGGRSDYSDPYGPGTAGHVGGASTVSSYHDNPFRRQEANPFDGQDTEYHSGSLSAASGRYAAAPAAPAADGFEDARFPQADYDRIGRP

SEQ ID NO: 3756 - DNA, 3087 bp, Myceliophthora thermophilia
atgaattcacgcctaaccggagttcgacgggagatccgtcgctgttccggtgcaaaatccgcagccgatgcacccgggggaaacgagcggtcagggttggcgagctccccgggcagcactctacaatatggcagttttgggccatcgccatcgcgccagagcgacaggaacgactttgaactcccggcccccgccatgcgggttccctccaacacgggcgatcccgtatggcaccgtatgccactcccgcgcagcgcaactatggcggatgatgcagcaaggttgggccgcccctccccgtcgttgcgcaccttccggtccagaggcacagctccaacgccgcgcctgcgtgttgcccggctcttctccaccgcttcctcggcgcccaggcagacgccaaacagggccgagatcgggttgcagaacctggactacgtccgctcggccgagcgcgacttctttgcatttctcgacagcgagctggacaagatcgagacgttctacaaggagaaggaagatcaggcgacggagcgcctggccgcactgcgcgcccagcttcacgagatgcgcaacagacggaccgccgagattgccgagtcgagaaagaggagagagcaggcgcgcagcagcaggcgcagcgaggaggaagacgccaacgggcggcccaaggaccgcaatcgagcctggatcggcccgctcaaacaccgcttcatcaagcccgggcccaactcggaggagctccagaagatgaccaggacccccgtcatgacgggccagagccagacggtggacgtgggccgggactacgtgcggagaccacagcaggccaacgacgtcccgtaccggaccgccaagcgcaaactcaaactggccatgcaggagttctaccgcagtctcgagctactcaagtcgtacgccctcctgaaccggacggcgttccgcaagctcaacaagaagtacgacaaggcggtcaatgcccggccgccctaccggtacatgaatgagaaggtgaacaagtcttggttcgtcaatagcgacatcctagacggccacttgcgcaccgtcgaagatttgtacgccaggtactttgagaaagggaaccacaagatcgccgccgggaagctccgagccctgcaaaaacgtcagggggactcctccgacagcgcgttccgcagcggcctgatgatcggcctcggctccgtcttcgccgttcaggggctcatatacggctccgagatcctcctcggccacgaggacgaggattttgtcgaacagacgggctacctcctccagctgtatggcagttacttcctcatcctcctcctcttcggcttgttcaccctcgactgccggatgtggtccaagaataaggtcaactaccccttcatcttcgagttcgatgccaggaattttctggactggaagcaggtggccgaattccccagcttcttcttcgccctgttcggcgtcttcctctggctcaacttctcgaggtcgggcaactgggaagagctgtacctgtattaccccgtcatcctcatttgcatttctctcgtcatcatctttctcccggcaccgatactgcatcacaaggctaggcgctggttcttgtactctcattatcggctcctcctgtcgggtttatacccagtcgagtttcgggacttctttctcggggatatctggtgttccttgacctacgccacctgtaacatcgagctcttcttctgcctctacgcacgcagctggaacgatccggacgagtgcaactcgtcgcattctcgccttctcggcttctttgccgcccttcccccgatatggcgcgccctccagtgcatcaggcgctaccgagacacgcggaatgtgtttccccacctcgtcaactgcggcaagtacaccatgacgatcctgacggcggtctggctcagtctctaccgcattgacgacacccggaccaacctgagcttctttatcgcgtttgcctccatcaacgccgtgtactgctcaatctgggatctctttatggatttctccctcctccaagccaacgctcagcagcggctcttacgcgatatcacggcgctccggcccgtctggatctactatgtcatcatggtcctcgacccgatcctgcgcttctcgtggatcttctacgccatcttcacgcacgacatgcagcacagcaccatcgtctccttcatggccagcttcgccgagatcgtccgccgcggcatgtggactctgctgcgcgtcgagaacgagcactgcgccaacgtcgcccagtacaaggccgcccgcgacacgcccctgccctaccacctcgagcagtttgtccagcggcccagcctcgaacaagccgcagccgccgccaccgctaccgccggagctgtgggggccggagcggccttggcgccggcggtcgacgatgccggccggccgaccacgggagccgccgccacgccgagcctgcgccacagacccggcacggcagccacgcctgcagctgcagctgcagcgactccctcctccctgcgcccggtcaccgccgccaccaccactatggcgcccacaccgcgtagcgagagagccgccgcgccgcaggaggtgacggcaacggcgctcgaggagggagcggcggcggcggtcgccaggtcgggcacgttccgccggcggctgtccgacgcggtcggcaagcggtcgatcctgcaggccatggcggaggcgcacaagcaggactttgagaagcggcggccgacagccgccgaggcagggcgggacgaccggcgggcagcggtgggcggtggcggtgccgcggatgaggaggaggaggtggatgacgtcctggggagcgaagacgacgagatggaggagttgaagagcgactacgacgacgacgacgacgatgacgatggtaacgaacatggtgacaataacaatgatggtgctgggcatcaccatcatcatcagcatcatcgccaacatagtcttcaacaccatcgccatcacagtcttcaacatcatcgtcgtgttcatagtgtggggggtggtggtggtggtggtggtaggggtaacggcagcggtgagtag

SEQ ID NO: 3757 - protein, 1028 aa, Myceliophthora thermophilia
MNSRLTGVRREIRRCSGAKSAADAPGGNERSGLASSPGSTLQYGSFGPSPSRQSDRNDFELPAPAMRVPSNTGDPVWHRMPLPRSATMADDAARLGRPSPSLRTFRSRGTAPTPRLRVARLFSTASSAPRQTPNRAEIGLQNLDYVRSAERDFFAFLDSELDKIETFYKEKEDQATERLAALRAQLHEMRNRRTAEIAESRKRREQARSSRRSEEEDANGRPKDRNRAWIGPLKHRFIKPGPNSEELQKMTRTPVMTGQSQTVDVGRDYVRRPQQANDVPYRTAKRKLKLAMQEFYRSLELLKSYALLNRTAFRKLNKKYDKAVNARPPYRYMNEKVNKSWFVNSDILDGHLRTVEDLYARYFEKGNHKIAAGKLRALQKRQGDSSDSAFRSGLMIGLGSVFAVQGLIYGSEILLGHEDEDFVEQTGYLLQLYGSYFLILLLFGLFTLDCRMWSKNKVNYPFIFEFDARNFLDWKQVAEFPSFFFALFGVFLWLNFSRSGNWEELYLYYPVILICISLVIIFLPAPILHHKARRWFLYSHYRLLLSGLYPVEFRDFFLGDIWCSLTYATCNIELFFCLYARSWNDPDECNSSHSRLLGFFAALPPIWRALQCIRRYRDTRNVFPHLVNCGKYTMTILTAVWLSLYRIDDTRTNLSFFIAFASINAVYCSIWDLFMDFSLLQANAQQRLLRDITALRPVWIYYVIMVLDPILRFSWIFYAIFTHDMQHSTIVSFMASFAEIVRRGMWTLLRVENEHCANVAQYKAARDTPLPYHLEQFVQRPSLEQAAAAATATAGAVGAGAALAPAVDDAGRPTTGAAATPSLRHRPGTAATPAAAAAATPSSLRPVTAATTTMAPTPRSERAAAPQEVTATALEEGAAAAVARSGTFRRRLSDAVGKRSILQAMAEAHKQDFEKRRPTAAEAGRDDRRAAVGGGGAADEEEEVDDVLGSEDDEMEELKSDYDDDDDDDDGNEHGDNNNDGAGHHHHHQHHRQHSLQHHRHHSLQHHRRVHSVGGGGGGGGRGNGSGE

SEQ ID NO: 3758 - DNA, 234 bp, Myceliophthora thermophilia
atgcttcagcaggcctccattcttcaccttcagtttacggcagtccacatgcagagaatggctgcttggtttgaacgcacacaagaaccgaaaccggcacccgcaaggtcccttgcaaccacgttgcagaaacagagaccaatcatgtcggagaccgcaatgtttaggagcgttaacttggcacgccggcagggctcgcgcgagacagccagggcattgttggagaaaccctaa

SEQ ID NO: 3759 - protein, 77 aa, Myceliophthora thermophilia
MLQQASILHLQFTAVHMQRMAAWFERTQEPKPAPARSLATTLQKQRPIMSETAMFRSVNLARRQGSRETARALLEKP

SEQ ID NO: 3760 - DNA, 243 bp, Myceliophthora thermophilia
atgcctcaggaaatcggcgacatcaagaagttcatcgagatctgccggcggaaggacgcctcctccgcccggatcaagaagaaccccaagacccagcagatcaagttcaaggtccgctgccagaggttcctctacaccctggttctgaaggactctgagaaggccgagaagcttaagcagagcctgccgcccaacctccagattaaggacgtccccaagaggaacaagcggagctcgtcatga

SEQ ID NO: 3761 - protein, 80 aa, Myceliophthora thermophilia
MPQEIGDIKKFIEICRRKDASSARIKKNPKTQQIKFKVRCQRFLYTLVLKDSEKAEKLKQSLPPNLQIKDVPKRNKRSSS

SEQ ID NO: 3762 - DNA, 465 bp, Myceliophthora thermophilia
atgtctccatcgcaaaaacagcaggatcctggaacgtatgtaaagcgtgcctactgcgtcgagggtgcgtactgtacatgcccgctcggccagcgattgaatgtggcgcatgttgcagcactcgagatagtggagtattccgcatgcgctgcgtctttccctctactccgtatggagtactctggtgtggaatggcgagtgcccaaaactcggctctcgttcctcgatcgtgacctgcagtgcggctcgggagatggcaacggagccgttcactacgccgaatttggcggcgccatccggctcggcataacttgcagtgtttgcatcgtcgcagagagaacccgagaagtggaaaacgaaaacgaactgtcgccgatcggggtctgtcaagcagaaccatcaagcaatgtcggccacaacgtgtcagccgcccaacaccgcccgatgctcctggcgccaggttaa

SEQ ID NO: 3763 - protein, 154 aa, Myceliophthora thermophilia
MSPSQKQQDPGTYVKRAYCVEGAYCTCPLGQRLNVAHVAALEIVEYSACAASFPLLRMEYSGVEWRVPKTRLSFLDRDLQCGSGDGNGAVHYAEFGGAIRLGITCSVCIVAERTREVENENELSPIGVCQAEPSSNVGHNVSAAQHRPMLLAPG

SEQ ID NO: 3764 - DNA, 741 bp, Myceliophthora thermophilia
atgtccaagattaacaccatcttgctcgactgcgacaacaccctcgtgctgtccgaagagctcgccttcgagggctgcgccgaactgatcaacgagatcgccgccgccaagaatgtgcctctcgagaagcccttcacgggcgagtcgctcatcgtcgagttcgtcggccagaacttccgcggcatgctgttgtcgctgcagaagcgctacggcttccccctgaccgacgccgagctcgaggactacgtgcgccgcgaagaggacgtcgtcatcgccaagctcaaggagaagctcgtgtcgtgcccgggcgtcgacgacgtgctcgccaagctggccgcctcgggcgagtacaagctcgccgtcgtcagcagctccgccctccgccgcgtccaggccagcgtcgacaaggtcggccagtccaagtactttggcggcgacatcttctcggccgccacgagcctgcccaagcccacgagcaagcccgacccggccatctacctgcacgcgatggagaagctcggcaagaaggccgacgagtgcgtcgccgtcgaggacagcaagagcggcaccctcagcggcacccgcgccggcatcaaggtcatcggctacgtcgggccgtacaaggaggcagagagggagaagatggtcaaggttctgaccgaggccggcgccgtcatcatcatgcacgactggagcgagttcgaggactgcttggccaaggttcagcgtggcgaggtctaa

SEQ ID NO: 3765 - protein, 246 aa, Myceliophthora thermophilia
MSKINTILLDCDNTLVLSEELAFEGCAELINEIAAAKNVPLEKPFTGESLIVEFVGQNFRGMLLSLQKRYGFPLTDAELEDYVRREEDVVIAKLKEKLVSCPGVDDVLAKLAASGEYKLAVVSSSALRRVQASVDKVGQSKYFGGDIFSAATSLPKPTSKPDPAIYLHAMEKLGKKADECVAVEDSKSGTLSGTRAGIKVIGYVGPYKEAEREKMVKVLTEAGAVIIMHDWSEFEDCLAKVQRGEV

SEQ ID NO: 3766 - DNA, 1365 bp, Myceliophthora thermophilia
atggtacagtacatcttcaccccctggcgcaaccgccgcgagctgctggccgtccgccggcagttctaccccgaccgccatcctcagcggcaaccaccgcgacggcaaaccccgggccaggctcagttgtctagcaccaacacggccgctaccgcctactcgacataccgtgctactactgtcaacgagctaccaccaccaccactaccaccaccatcatcatcatcatcatcattgacaacagcaaaacaacaagcagtcggacggagacggagccatggcgagaaacaagaggccgtcgcccgcgtgtccatgtggatgcagcgcggcggctgtccgcacatggtcgagtcgaccgcgctgttaacggcggccatcttgagcgacgaggtgacgggggggccgggggcggggagcgacgacgggctggcgagggcgtcgagggcgtacgccgtgcgcgcggcatattcggccgcttttagtcgcttcgtgacgggcctgctcgactcccaccaggacagacagcgcaagatgtccatgtacgacgtggccaagagcgtcggcctgcccgccacctttgtcgagctccgccaccaggccacccacgagcagctcccctccctggcgcgcctgcgcgccgccgcggacaaggcgctcgactggatctgggagtactactggcgcggcctgacggccggcgacagcgacagtgacagcgacgagcacgaatctgacgcggacgaggacgaggccgatgcgtctggaagggaagagtctggtgccgaggcgatggagggggtgttgggtgagggtgatggtgatggtgagaatgatggtcctgacgtgacgatgagggaggaggatggttgtggtggtagtggtggtggtgttggcgatgggcacaagccggcacaggaaaaggagataaggacgctgctggaggggtatttagagggcaacgaaaagcagccgcaggaggaggaggaggaggaggaggagaagctgaagagggaacttgggaggttcgacgagggactggtgttgatggtgcttgactccatcacggacaacacgagggacagtaaagtgctgcgtcgggctttggtcctggggaggcgaatcctggagtggaaggggaaccaagagcacgtaagcggtgcggaccgcatggaagaggatgggccggctggagatgattcgtctaggaccgggatggacacgagggaaaagatggcgaccgaggaaggtgaggaagaggacgacaaagaggaggtcgaagacgaggaagaggacgaggacgaccgccctgcttgggttttgtacgacgcagagacctgggtacccaagcctatcggggttgtttga

SEQ ID NO: 3767 - protein, 454 aa, Myceliophthora thermophilia
MVQYIFTPWRNRRELLAVRRQFYPDRHPQRQPPRRQTPGQAQLSSTNTAATAYSTYRATTVNELPPPPLPPPSSSSSSLTTAKQQAVGRRRSHGEKQEAVARVSMWMQRGGCPHMVESTALLTAAILSDEVTGGPGAGSDDGLARASRAYAVRAAYSAAFSRFVTGLLDSHQDRQRKMSMYDVAKSVGLPATFVELRHQATHEQLPSLARLRAAADKALDWIWEYYWRGLTAGDSDSDSDEHESDADEDEADASGREESGAEAMEGVLGEGDGDGENDGPDVTMREEDGCGGSGGGVGDGHKPAQEKEIRTLLEGYLEGNEKQPQEEEEEEEEKLKRELGRFDEGLVLMVLDSITDNTRDSKVLRRALVLGRRILEWKGNQEHVSGADRMEEDGPAGDDSSRTGMDTREKMATEEGEEEDDKEEVEDEEEDEDDRPAWVLYDAETWVPKPIGVV

SEQ ID NO: 3768 - DNA, 750 bp, Myceliophthora thermophilia
atgtccttcttcttgactgctgctgcaaggcgctcttctcagccacggtttacctctctcgctagcagttccgtcatcgctcgcaagatgcatatccaatcgattcctatgtttgacgacaaatccaaggacgccgtcatcattgaccccgcccatccagccgatcattgggatcatgccggtggaaacgaggagctgatttcagagcttgggcagcccctcgagatcatcgggggaaaagactgcaaaaaggtgtcaaggacgccaaagcacggcgagacgtttaacattggcagcatcgcagtcaaggcgctccacacgccctgccacacccaggacagcatttgctggttcatgcaggatggcgacgacaaggttgtgtttacaggagatactctcttccacggaggctgcggcaagttcttcgagggcacgggcgaggagatgcacaaggcgctgaacgagactctgggctcgctccccgacgatacccgggtctttcccggccacgagtacaccgcggccaacgccaagtttggcctctcggtcctcccaagcgggccgctcaaggccctggaggcttttgccaaggccaacaaggagacccagggcaagttcactattggcgacgagaagcagcacaacgtgtttatgcgacctcaggaccccgaaatccaaaaggccacgggcgagaccgatccggttgccatcatgaccaagctgcgcgagatgaagaacaacttcaagtga

SEQ ID NO: 3769 - protein, 249 aa, Myceliophthora thermophilia
MSFFLTAAARRSSQPRFTSLASSSVIARKMHIQSIPMFDDKSKDAVIIDPAHPADHWDHAGGNEELISELGQPLEIIGGKDCKKVSRTPKHGETFNIGSIAVKALHTPCHTQDSICWFMQDGDDKVVFTGDTLFHGGCGKFFEGTGEEMHKALNETLGSLPDDTRVFPGHEYTAANAKFGLSVLPSGPLKALEAFAKANKETQGKFTIGDEKQHNVFMRPQDPEIQKATGETDPVAIMTKLREMKNNFK

SEQ ID NO: 3770 - DNA, 2526 bp, Myceliophthora thermophilia
atggcaattcagaagaaacacggcaagggccgtctcgacaagtggtacaagctcgccaaggagaagggataccgcgcgcgtgcagcattcaagttgattcagctcaacaagaaatatggcttcctcgagaagagcaaggtcgtgctcgatctctgcgcggcgcccggatcatggtgtcaagtgtgtgccgagacgatgcccaaggacagcatcattattggcgtcgatctcgccccgatcaagccgattcccaaggtcattaccttccaaagcgacattacgactgagaagtgccgtgcgaccattcggacacacttgaagacatggaaggccgactgtgtgctccacgacggtgcccccaacgtcggtaccgcttgggttcaggattcctacaatcaggctgagctggccctccattcgctcaagctcgccaccgaattcttaattgaggggggaactttcgtgaccaaggtcttcagatctaaggactacaattccctgttgtgggttctcaaccagctctttacaaaggttgaggcgacaaagccgccgtcctctcgtaacgtctcggcagagatcttcgtcgtgtgtcgcggctacaaggcgccgaagcgcattgacccgcgcttgctcgacccccgctccgtcttcgaagacctggcagacccggcgcccaacaatgaggccaaggtgtacaacccggaagtcaagaagcgaaagagagagggttacgaggagggtgactacacgcagtacaaggaaattgctgccagcgaattcattcagacgaccgatcccctcgccatccttgggcagtacaaccgactgacgttcgaacaaccaaagaatggggacgtagccctggcggccctggacaagttgcccgagacgacgcaggagattcgccattgttgcgcggatctgaaggtcctcggaagaaaagacttcaagctccttctaaaatggcgtcttaaggtcagggagatctttggtctccctactaagaagaccaccaaggctcctctcgtggaagaggtggctgaggtggagaacatggacgaagagctcaagatccaggaagagctgcagaggataaaagataaggaattggcgaagaagaagaaggagcgacgaaaggagaacgagaggaagcataaggagattgtgcgcatgcagatgaacatgacagcgcccatggacatcggtatggagcaggagggccctaggggcgcagatgccatgttccgcctcaagtcgatcgatcagaccgaggccctacgcaggatagccaagggcaagatggccacgattaccgaggtcgatgccaagaaggaccgcgactccgggattgggagctcgggcgagacggacgacgagagcgacgaagagctggaccgcttggaacgcgagctggacaacatgtacgaatcctacaaggaaagaaaggcggctgcggacgccaagtaccgggcgaagaaggcgaggaaagagtacggggacgacgagtgggaaggtgtgtcggcgagcgaaaaggaggagagcgacgatgacgacgagatactcgaagaggaaagcagcgatgattccgacgccgaggagcgcggggacaccagcaagccgcttctgcgggaccttgacaacaccccccaggacggggccgggttgtcaaagcgagcccggggattcttcaaccaggagatcttccggagcatccccgggttattggatgtcccggaagacacagagggtgaagatgaggcgaaaaatgcggatgagggggcggcatccaacggcgaggactcggacaacgatgtgccaaccattgaggagcagaagaaaatgcgcaaggagaaggcggcacgtaaggagaaggagaaggaggacgactttgagattgtcaagcaggaccaggattccgacgacgactgggaggagaaagagaagaagaagaagactaaagatggcaagcccaatatcgacatcatcacggccgaggccatgacgctagcgcaccagcttgcgcgcggagaaaagtcaaaacacgatctcatcgacgaggggtacaacaaatacgccttcaaggaccgggacggcctgcctgactggttccttgacgacgaggccaagcatgacaagccgcacaagcccatcaccaaagaagcagcggcagccatcaaggagaagctgcgagcctacaacgccaggccgatcaagaaggtggccgaggcgcgggcacggaagaagctcaagcaggcgcagaagctcgagaagctcaagaagaaggctgatctgctggccggggatgagggcatgtcggagaaggagaaggccacaagcattgctaaactgatgtcggcggccgcacggaagaagaggaagccgccggtcaaggtgatcaaggcaacgggtgtgaaccgtggtatctctggcagacccaggggtgtcaagggcaggtacaaaatggtggatccgcgcatgaagaaggagatgcgggcgttgaagaggattgcgaagaagaggaagtag

SEQ ID NO: 3771 - protein, 841 aa, Myceliophthora thermophilia
MAIQKKHGKGRLDKWYKLAKEKGYRARAAFKLIQLNKKYGFLEKSKVVLDLCAAPGSWCQVCAETMPKDSIIIGVDLAPIKPIPKVITFQSDITTEKCRATIRTHLKTWKADCVLHDGAPNVGTAWVQDSYNQAELALHSLKLATEFLIEGGTFVTKVFRSKDYNSLLWVLNQLFTKVEATKPPSSRNVSAEIFVVCRGYKAPKRIDPRLLDPRSVFEDLADPAPNNEAKVYNPEVKKRKREGYEEGDYTQYKEIAASEFIQTTDPLAILGQYNRLTFEQPKNGDVALAALDKLPETTQEIRHCCADLKVLGRKDFKLLLKWRLKVREIFGLPTKKTTKAPLVEEVAEVENMDEELKIQEELQRIKDKELAKKKKERRKENERKHKEIVRMQMNMTAPMDIGMEQEGPRGADAMFRLKSIDQTEALRRIAKGKMATITEVDAKKDRDSGIGSSGETDDESDEELDRLERELDNMYESYKERKAAADAKYRAKKARKEYGDDEWEGVSASEKEESDDDDEILEEESSDDSDAEERGDTSKPLLRDLDNTPQDGAGLSKRARGFFNQEIFRSIPGLLDVPEDTEGEDEAKNADEGAASNGEDSDNDVPTIEEQKKMRKEKAARKEKEKEDDFEIVKQDQDSDDDWEEKEKKKKTKDGKPNIDIITAEAMTLAHQLARGEKSKHDLIDEGYNKYAFKDRDGLPDWFLDDEAKHDKPHKPITKEAAAAIKEKLRAYNARPIKKVAEARARKKLKQAQKLEKLKKKADLLAGDEGMSEKEKATSIAKLMSAAARKKRKPPVKVIKATGVNRGISGRPRGVKGRYKMVDPRMKKEMRALKRIAKKRK

SEQ ID NO: 3772 - DNA, 666 bp, Myceliophthora thermophilia
atggcagcgtccgagccaggcggccacgccttccaggaacaacagggtttcatcgacgaccaattcgacatattcgactggtacccgtatttccagtcctgcgtccgctacttcctcgagcacgcgcagtttgacggaccggtccaggccctagccgcctacctcaacatccagctccccttccagagagcccagaacgccctcctccgagcctctccgaacccgggcaacatctcgctgcacccgtacatccggcgcctcgtggcgacgggattcgacgcgccggccgtgctgcacggcttcttcggcgacgactgggagctgggcgtgcgcccgctgcacgagcaggagcgccgcaactacctgttcgccgccaagagcggcagctggctcgaggtcaagcgggcgtacgacacggcccacggcccggcggccggccccttctccttcttcccgccttccgccgccgcggcggtcccgccctcggcgcccgtctcgccgccggcgccgccaccaccaccaccgcttcacccgttctcctcgtcgtcgtgggcggccgaggatgagagcgtgccattcctgcggccgctgcggaatgtgaccgaggcggaaatcgtcgctgccgaggcggggtggagcgagtggttggccatgcaggattggtga

SEQ ID NO: 3773 - protein, 221 aa, Myceliophthora thermophilia
MAASEPGGHAFQEQQGFIDDQFDIFDWYPYFQSCVRYFLEHAQFDGPVQALAAYLNIQLPFQRAQNALLRASPNPGNISLHPYIRRLVATGFDAPAVLHGFFGDDWELGVRPLHEQERRNYLFAAKSGSWLEVKRAYDTAHGPAAGPFSFFPPSAAAAVPPSAPVSPPAPPPPPPLHPFSSSSWAAEDESVPFLRPLRNVTEAEIVAAEAGWSEWLAMQDW

SEQ ID NO: 3774 - DNA, 543 bp, Myceliophthora thermophilia
atgacagaatctcaacgtgcccgtcgtggatccatcgtcgccattgcagagcaacggcagaacctcgcatcgctcgattcgtccattctcgaccgcctgcccgcctattcggccaccctcttcgaggccaagacgcagaagcggctcacgttcgaggccatcgccgagtacctgggccgcagcgaggtggccgtggcggccatcttctacgggcaggcgcgcgcgtcgccggaggacgtggacaagctggtgcggctgctcggcctgtcggccgagtccaacgtggcggcccagatgatgggcttcccggaccgcgggcgcgccgggcccatgccgcccgtcgagccgctcatctaccgcctgtacgagatcgtgcagaactacgggtacgccttcaaggccgtcatcaacgagaagtttggcgacggcatcatgagcgccatctgcttcaacagcaaggtcgagaaggaagtggacgagactggcacgccgtgggttgtgatcactctcaaggggaaatggcttccattcagccggttctag

SEQ ID NO: 3775 - protein, 180 aa, Myceliophthora thermophilia
MTESQRARRGSIVAIAEQRQNLASLDSSILDRLPAYSATLFEAKTQKRLTFEAIAEYLGRSEVAVAAIFYGQARASPEDVDKLVRLLGLSAESNVAAQMMGFPDRGRAGPMPPVEPLIYRLYEIVQNYGYAFKAVINEKFGDGIMSAICFNSKVEKEVDETGTPWVVITLKGKWLPFSRF

SEQ ID NO: 3776 - DNA, 996 bp, Myceliophthora thermophilia
atgtcaaccacgactccaaagttcaactccaaatcccccaccatccgccgtatcctccgcgaagcccacgaactcaccagctccccgtcggccgactaccacgcggtcccgctcgagacggacctgttcgagtggcacttcaccctgcgcgggccgcccaagtcgcccttcgagtcgggcatctaccacggccgcatcgtgctcccgcccggctacccgctgcgcccgccctccttccgcttcctgaccccgtccggccggttcgagaccaaccgggagatctgcctcagcatctcgggccaccacgaggagacctggcagcccgcctggggcatccgcaccgccctggtcgccctgcggaccttcatggagacggacgtcaagggccagctgggcggcctcgagagcggcgaggccgtgcgccgccggctggccgcggagagcagggcgtggcggtgcggcgtctgctgcgggggcaagaccaacgccgagatcctggccgagtgcgaggagagggtcaaggagagcggcggggaggggagaggaagggaagaagaggtccaggtgccggaggagctgaggatggggtggcgcgacgagatggaggccgatcagcgaggctcgggccagcagagccaggacgaccgggacggagagagcgacgcgctggccgaggggttcgtgcagactaccccgtcgggggaaacgtcagcgagtggacagcaccagctacacgatcagcaacgacaacaacaagaacaacaagaacaacaacaacaacaacaacaacaacagtttgcacaagggagcaccgtgccgcagccgccgacaaggacaacgccttcgtcaagtccgctagaagcgacgacagccggcccggcgctgcagcaagctcggcaggggccggtggatgagacgacagtgtggctggaccggctgatctttgccgtggctgttctcctggctgctgtggtcgccaaggtcatgctggcatga

SEQ ID NO: 3777 - protein, 331 aa, Myceliophthora thermophilia
MSTTTPKFNSKSPTIRRILREAHELTSSPSADYHAVPLETDLFEWHFTLRGPPKSPFESGIYHGRIVLPPGYPLRPPSFRFLTPSGRFETNREICLSISGHHEETWQPAWGIRTALVALRTFMETDVKGQLGGLESGEAVRRRLAAESRAWRCGVCCGGKTNAEILAECEERVKESGGEGRGREEEVQVPEELRMGWRDEMEADQRGSGQQSQDDRDGESDALAEGFVQTTPSGETSASGQHQLHDQQRQQQEQQEQQQQQQQQQFAQGSTVPQPPTRTTPSSSPLEATTAGPALQQARQGPVDETTVWLDRLIFAVAVLLAAVVAKVMLA

SEQ ID NO: 3778 - DNA, 3183 bp, Myceliophthora thermophilia
atgacgaccaaggcgaaggcgcttgccctcaatggcatgcacaccgccggcatcttctccgatatgagcttcgacgggcccgagattggcaccctggtgctcgtcatcgatcgtgcgaagaacctgcccaaccgcaaaaccattgggaagcaagatccctactgtgccgctcgtctgggaaaggaggcgaagaagacgacaacagacatccgcggaggccagactcctcggtgggatcaggaactccggtttaccgtccatgactcgcccgactactaccagatcaaggtctcggtattcaacgacgacaagaagacggagctgatcggagaggcgtggatcgacctgcgggacattgtggtgccgggaggaggacagagtgataagtggcaccagctaggatataagggcaaatacgccggcgaggtgcgcatcgagatcacgtactacgacagtcgtcccaagcccgagaagccggcagccaaggcaaaacccccccctccggccgaggccgaagcgaaccctacggccgccgctgccgggcctcggtcggtgcccaagcgccgcccattgccctccgatcccgtcacggggaagcctcccgctcccccccagcctgctccggaacaagtggaaacgccccctcgccctcagccgaacccggcaccggtccctcatcaacaggccgagtacaacccggcgccagcgccggtccaccagcactaccagcagccggatcaggtcagagagctggggaccccgtcacgtcgggctgacgcccccagtcagcagtacaggactcccgagaggcacgagccgtacgcggcacagcacaaccaagcctacaacagcccacaccgtcagcagccgggacccgaccgccgtgaatcgtacgatattccacagatcagcgacccgagagctgccgacgacgacaggccgcccccgccgcctgcccatcggagcaggactggtagcaacccaccggcgagcaactcgttccaggcgacgccgccgaccatgcaccaggatgtcctgagaagcgaagcccaccggaattccgtctctggaagctatcccggccggcctacatacaaggccgtcgattctgccccggcagctctccccagtaatcagtatgccaacgtggaccaaggtccccccgcccggtcctactcttacgatccgccctacgagcccaacaggacgatgcaggccacggtcgaagatgtacccgagtccccggaatcgacgaacagaagaacctcgggccgctggccgcagccgcagccgcagccgcagtcgcagtcgctgccacacctctaccgggactacgacatggatgccagccctgcgccgctcaatctctcgggacggggcagcagtgaagcggctgctctcgctcttacacggactatgcgccaaactatggccggcactctgagcttcagctacacagtccagctgagcagagggctcgtcgtcacctaccggggtgacgcggacgagggggcgaatgactatccggtgcctcccgtaccggcgtccctagtcccgggtatcgacccgaacatttcccaggaagtatcagagcggatcaaccaagaccggaggcagccgaaccagatacggggtgcctcacagcaagccatggtcgatacgccgccgcgggggaggtccatgaacgacagatatggcaacgacccttcctctacgccgcacagtgcaccgcccacccagaataggagccccatcgtgtataccaacgggccgtcgacgtcgagcgtcaacgtggtcatcaagtcgcgggcctactccccgaaccctccgcgagatccaagcccgaacccgcaccagcagcatactatccgccgcaagtcaatcagcccgcgacccccagtggaaaacgagcgccgcctctccggagttcccttcagtcccgactcgtacgacgccctcaaccccaatgcttcctcggctgccctcaaggacgccgcatcctcgcgccccgactacagggaagaaacgggcaaaatcatctctcacgacgggcgcgaaatcgacccttcggaccatctgccaatggagagctgggcacccgagccggagccgaaacagcctacctcaacaaccgcgtccgccccgtcccggccttccctgtcaggcccacatcctgttccggcctcgggccgtcgccccctgcgcatcgcaggccgaccgcattccatgctcccgaccgccgggtcctcttcatcaggcgtcaccttctccggcggcatcacagaccacgtcgagtccgtaacgtcctcacaacccgttgcctcctcgacggggcgaagccgcctgcagaaaaaagccgcctaccggcaatctacgtcgacgttcacacccgtgatgtcgggcgctaacgggcctggccccggacccagttctgcgcctagtgtcatacggaagagcaatagcggcgaagcgctgcatcaggatacctcgtttaccgcgccgcggccgggcgggatcccccgcggttccacgtttgactacgtcatcgacggcgccgctaccgataaccacgcgtcgccgcatcacggtcatggcacttcgggggtatacggcacctccccgggcagtcagcgtgacttgcacggccggaggagccacagcaggggtcacagcccagcccgtggctacgaacgcggatacgacggatccggacatcttcatcagtacagcaggagcgccggcagcatcaacgggttctcggccccggcatcgacctcggcgccgccgccgccgcccatcccggccaaggtcccgctcgcgctgcctcctgcgtcgtcgtcgtcgtcgtcgtcgccgccgctggggagctcgcctggcagcgctggcgggatgagcggggcgctgcagctgcacagcagcagcgccgccaggagggcggggagcgggatggaggacggaagcgggtatgcaggtcatgggtaccaccaccaggacggatatgggtacggtgtgcacggaggaggaggaggaggaggaggagggtggtcgttgtcgctggaggaggagctgaggcagatcgatatcgggacgggccggtcgagccgcaagcataacgctgccgggtacggcgccggcgggaggcagggatacgggaccgtttatggacaacaaggggggtattga

SEQ ID NO: 3779 - protein, 1060 aa, Myceliophthora thermophilia
MTTKAKALALNGMHTAGIFSDMSFDGPEIGTLVLVIDRAKNLPNRKTIGKQDPYCAARLGKEAKKTTTDIRGGQTPRWDQELRFTVHDSPDYYQIKVSVFNDDKKTELIGEAWIDLRDIVVPGGGQSDKWHQLGYKGKYAGEVRIEITYYDSRPKPEKPAAKAKPPPPAEAEANPTAAAAGPRSVPKRRPLPSDPVTGKPPAPPQPAPEQVETPPRPQPNPAPVPHQQAEYNPAPAPVHQHYQQPDQVRELGTPSRRADAPSQQYRTPERHEPYAAQHNQAYNSPHRQQPGPDRRESYDIPQISDPRAADDDRPPPPPAHRSRTGSNPPASNSFQATPPTMHQDVLRSEAHRNSVSGSYPGRPTYKAVDSAPAALPSNQYANVDQGPPARSYSYDPPYEPNRTMQATVEDVPESPESTNRRTSGRWPQPQPQPQSQSLPHLYRDYDMDASPAPLNLSGRGSSEAAALALTRTMRQTMAGTLSFSYTVQLSRGLVVTYRGDADEGANDYPVPPVPASLVPGIDPNISQEVSERINQDRRQPNQIRGASQQAMVDTPPRGRSMNDRYGNDPSSTPHSAPPTQNRSPIVYTNGPSTSSVNVVIKSRAYSPNPPRDPSPNPHQQHTIRRKSISPRPPVENERRLSGVPFSPDSYDALNPNASSAALKDAASSRPDYREETGKIISHDGREIDPSDHLPMESWAPEPEPKQPTSTTASAPSRPSLSGPHPVPASGRRPLRIAGRPHSMLPTAGSSSSGVTFSGGITDHVESVTSSQPVASSTGRSRLQKKAAYRQSTSTFTPVMSGANGPGPGPSSAPSVIRKSNSGEALHQDTSFTAPRPGGIPRGSTFDYVIDGAATDNHASPHHGHGTSGVYGTSPGSQRDLHGRRSHSRGHSPARGYERGYDGSGHLHQYSRSAGSINGFSAPASTSAPPPPPIPAKVPLALPPASSSSSSSPPLGSSPGSAGGMSGALQLHSSSAARRAGSGMEDGSGYAGHGYHHQDGYGYGVHGGGGGGGGGWSLSLEEELRQIDIGTGRSSRKHNAAGYGAGGRQGYGTVYGQQGGY

SEQ ID NO: 3780 - DNA, 2328 bp, Myceliophthora thermophilia
atggactacgacgccctgaaggagcagtggggcgaggtcgaggaccgcgatggcgtccgcctgagctggaacgtgtttcctagcactcgtatggaagcgtcgagattggtcgtccccatcggcgccctctacacgcccctcaaggagaagcccgacactcccctgctgcagtttgagcccgtcacctgcaagcagccatgccgctccgttctgaaccctttctgccaggtcgacgtccgcgcccgcctttggatctgccccttctgtctttcgagaaaccccctcccgccgcactacaaggacatcacggccaacgccatcccgcccgagctgcatccctccaacacgaccatcgagtacaggctgtcgcggcccgccccgagcccgccgattttcctctatgtcgtggacacgtgtcaggaggaggacagcttggccgccctgaaggagtcgctcatcatgagcctgagcctgctgcctgagaatgcgctggtcggcctgatcacgttcgggaccatggcccaggtccacgagattggctataccgagtgcgccaagtcgtatgtcttcaggggcaacaaggagtacaccgccaagcaggttcaggagatgctcggcctcgtgcagccggccatgcgcccgggcatgcctccccaccaccagccgggccggcccatgcccatgggacccgcctcccggttcctgctgccggttgctcaggccgagttccagctcaccaaggccctcgagcagctgcagaaggacccctggccgactaccagcgaccgcagaaacctgcgctgcaccggcgtggctctctcggttgccgtcggcttgctcgagacatccttccaaaacgccggcggccgcatcatgctcttcgccggcgggccggccactgagggccccggtatggtcgtcggtcccgagctgagagaacccatccggtcgcatcacgacatcgaccgcgacaatgtcaagtactacaagaaggcgctcaagttttatgacaacctcgccaagaggaccgctcacaatggccacaccattgacatcttcgccggttgcctcgaccaagtcggtctcttggagatgaaagggctctgcaactcgaccggcggccacatgattttgacggacagctttacctcttccatgttcaagcagtcgttcatccgcatcttcgagaaggacggcgacgataacctcctgatgggcttcaatgctgtgctcgaggttctgacaaccaaggagctgaaagtcacgggccttatcggccatgccgtgtctttgaacaagaagtcaacctcggtaggcgagaccgagtgcggcatcggcaacacctgctcttggaagatgtgcggcatcgaccccagatccagctacggcatctactttgagattgcccagggcggcccctcgcagcaccagcagagcccccagaagggcatgatacaattcctgacctactatcaacactcgtccggccagtaccacctccgcgtcaccacgatcgccaggaacctcagcgggccagccggcgacccggccgttgcgcaatccttcgaccaagaagccgcggctgtcttgatgtccagaatcgccgtcttcaaggccgaggtcgatgatagcccggatgtcctccgctgggtggacaggatgctcatcaggctctgctcgagatttgccgactaccgcaaggacgacccgtcgtccttccgcctcgagaagaactttaccctgtacccccagttcatgttccacctgcggagaagtcagttcttgcaagttttcaacaactcgcccgacgagacagccttctacaggcacgtgctcaaccacgaggacgtcagcaactcgctgatcatgattcaacccacgcttgactcctacaccttcgaccaggagggcggacagccggtgctgctggattccacgtccatccaaccaacccacatcctcctcctcgacaccttcttccacattctcatcttccacggcgagacgattgccgagtggaggaaggcaggctaccaggatcaagagggctatgagaactttgctgctctcctcgagcagccaaaggaggatgccagggatctcatcaccgaccgcttccctctgccacgcttcattgtatgtgatcacggcggctcgcaggcgcgtttcttgctgtccaagctcaacccgtcaaccacacatacctcgggcgccggagcctatggtggggttggtgcgcagagcgcgcagaccatctttaccgacgatgtgtctttgcaaacattcatggagcatctcatgaagctagcggtgagcggcacaaattag

SEQ ID NO: 3781 - protein, 775 aa, Myceliophthora thermophilia
MDYDALKEQWGEVEDRDGVRLSWNVFPSTRMEASRLVVPIGALYTPLKEKPDTPLLQFEPVTCKQPCRSVLNPFCQVDVRARLWICPFCLSRNPLPPHYKDITANAIPPELHPSNTTIEYRLSRPAPSPPIFLYVVDTCQEEDSLAALKESLIMSLSLLPENALVGLITFGTMAQVHEIGYTECAKSYVFRGNKEYTAKQVQEMLGLVQPAMRPGMPPHHQPGRPMPMGPASRFLLPVAQAEFQLTKALEQLQKDPWPTTSDRRNLRCTGVALSVAVGLLETSFQNAGGRIMLFAGGPATEGPGMVVGPELREPIRSHHDIDRDNVKYYKKALKFYDNLAKRTAHNGHTIDIFAGCLDQVGLLEMKGLCNSTGGHMILTDSFTSSMFKQSFIRIFEKDGDDNLLMGFNAVLEVLTTKELKVTGLIGHAVSLNKKSTSVGETECGIGNTCSWKMCGIDPRSSYGIYFEIAQGGPSQHQQSPQKGMIQFLTYYQHSSGQYHLRVTTIARNLSGPAGDPAVAQSFDQEAAAVLMSRIAVFKAEVDDSPDVLRWVDRMLIRLCSRFADYRKDDPSSFRLEKNFTLYPQFMFHLRRSQFLQVFNNSPDETAFYRHVLNHEDVSNSLIMIQPTLDSYTFDQEGGQPVLLDSTSIQPTHILLLDTFFHILIFHGETIAEWRKAGYQDQEGYENFAALLEQPKEDARDLITDRFPLPRFIVCDHGGSQARFLLSKLNPSTTHTSGAGAYGGVGAQSAQTIFTDDVSLQTFMEHLMKLAVSGTN

SEQ ID NO: 3782 - DNA, 576 bp, Myceliophthora thermophilia
atgcctcccaagttcgaccccaacgaagtcaagatcatccacctccgggcgaccggtggtgaggtcggtgcctcttcggctcttgcccccaagatcggtcctctgggtctctcgccgaagaaggtcggtgaagatatcgccaaggccactggtgactggaagggtctccgcgtgacggtcaagctcaccatccaaaaccgtcaagcccaagtctcggtcgttcccacagcatcctcgctcatcatccgggcgctcaaggagcccccccgcgaccggaagaaggagaagaacatcaagcacaacaagtcggtttccctggatgagatcattgatattgcgaggacgatgaggttcaagtccttctccaaggagctgaagggcacagtcaaggagattctgggcactgccttcagcatcggctgccaggtggacggcaagagtcccaaggctatcagcgatgcgattgaggcgggcgagatcgacagtacgtttgccctcctttctgctgagaatacctttcccctcgacttctgtcgcggctgccgcagggcacaccaggagcaagcggccggctaa

SEQ ID NO: 3783 - protein, 191 aa, Myceliophthora thermophilia
MPPKFDPNEVKIIHLRATGGEVGASSALAPKIGPLGLSPKKVGEDIAKATGDWKGLRVTVKLTIQNRQAQVSVVPTASSLIIRALKEPPRDRKKEKNIKHNKSVSLDEIIDIARTMRFKSFSKELKGTVKEILGTAFSIGCQVDGKSPKAISDAIEAGEIDSTFALLSAENTFPLDFCRGCRRAHQEQAAG

SEQ ID NO: 3784 - DNA, 573 bp, Myceliophthora thermophilia
atggctgacggactcaacgaataccggacggcgcgtgtggccgagctgctctccgactttcgcacgcttcaatactacatcgccgcggcgccctgcaacccccccaacatggacgactactacaccgaagggtgggcggagctccgacagtgcgcgatcgacgggcagcacatcctcaactgcgcggccgacattacggtgccgcgcgccaacggcgggcccgaggagcaggcgaaggcggaactgaagcaagtccttctcgacgcgtacgctcgcaggcacgagggacaaaagatctacctccgacagcaggcggcacagcgctggatcgactggcgggaccaggtcctcatgggcggcaggccgcacgcggggaaccagcaacaactcggagcaatcgatgatcacttgcgggctgagctcgcaaacatcaccgacgaagccgtctactcggagctacagacctccgacatcagcttgggccgctggacggccgaggatccgagcctggccctcgtcatggctgacgacattgtggacttccacaaacacatcacatttcccttcttctga

SEQ ID NO: 3785 - protein, 190 aa, Myceliophthora thermophilia
MADGLNEYRTARVAELLSDFRTLQYYIAAAPCNPPNMDDYYTEGWAELRQCAIDGQHILNCAADITVPRANGGPEEQAKAELKQVLLDAYARRHEGQKIYLRQQAAQRWIDWRDQVLMGGRPHAGNQQQLGAIDDHLRAELANITDEAVYSELQTSDISLGRWTAEDPSLALVMADDIVDFHKHITFPFF

SEQ ID NO: 3786 - DNA, 1758 bp, Myceliophthora thermophilia
atgtcggcacactcggcttctccatctccgttgcaatcgccggccaacggcctcgcggatgagagcaggatgcccaagggacattgtcgatacatccttctccaacccgagatcaagggccaaaggtgtgcttgtgtcaacttcacactcaacaagggcatccccggctctacctgcgaatgtggccatctggcatgttaccacaacagagagcctgatgtctctgcagaccagaggcaggagcttgaacagttgaagcggcggctgcagcatctcgaggagcagctctccagggggcaggaggacgtactggacagcgtcgtcagcaggctgaacgaagtggaggagcacctggagaagagcaaggaagaagtcggggagcaaataaaaggggcttaccggaacgtcagcatcagctggcggtctatcgaacaggcggagcgcaggagccagcagcacgacgagcaactccgccacatatacgacaagctgcgcgaccacgacgagcagctcgacagggtgcacgccggacagctcgagctccgagatgcggacctaagcttggaagagcgcatcgagaacctgaccgagacgctcgaggaggaggaagaagcgcgcctcgcggcggcgctcgccgcccggccgcagcggaggaggtcaacatccgacacgtcccgcccaagcgtcccgttgggccctttaggggcgggggccgcccaccaagtcccgtatccgtcgccaacgggcggccccatcagcaccagcaccttctcagaagtctgcgacggaaccgggcgcgacgccaaacgctcaactcgccatttttgtcggcacccctcctctccgcgaccggcactctccccacctgtccggcccaccggcccctggacggtccacatctccctcctcccccatgcctctgtgcccatgcccttcgagcgcaacacgactgcctaccagcgctgcctctcgcgggggcctgcatcgcatggtagccgtgcaaggccgagacgcggcctcgtttcaggaggccgtcgagaaggcgttcgggcagttcctccgcgggcgcgagtggatgccgctgcaggcgaagcttgtgcgacgcccccatgctgcccggcctcccgattgcttgcggcggctgggacgaccctaaaacggcgcatcccgcgacctggtcctggggacccagcgtgtgaccacgagttcctgcgccgccactgcgccgtcgtcgacccgcacggcgtcatcgactcgctgtacatcgccatgcgcaaccacaccatcagctggcacacgctacgccacgcgcccgtcttcatggaggggctcgaggactgctgggcctacgaccccctgctggataaggatccctttgacgacgccgacattgcggtagatgacgaagcccggcccgctgcgggagacatcactaccgcgctgccgccttctgcgggcggcgtggccgggctcaagaggccgctatcggagatgtcccgatccaatagcttcggctccgatgggaattcttctggtgctgccgcggcattacaggggtcctcgtcgtcatcatcatcatcatcttcttcttcttcttcttcttcttcctcctcctcctcctcctctaacaccacctctaccgccgccgccaccggagacatgatgggtgatgaggctcgtgtcaagagaccatgtcctgccccgccgtcagcgtcgattgtggagattcggaggagggataccatcaagactgtttga

SEQ ID NO: 3787 - protein, 585 aa, Myceliophthora thermophilia
MSAHSASPSPLQSPANGLADESRMPKGHCRYILLQPEIKGQRCACVNFTLNKGIPGSTCECGHLACYHNREPDVSADQRQELEQLKRRLQHLEEQLSRGQEDVLDSVVSRLNEVEEHLEKSKEEVGEQIKGAYRNVSISWRSIEQAERRSQQHDEQLRHIYDKLRDHDEQLDRVHAGQLELRDADLSLEERIENLTETLEEEEEARLAAALAARPQRRRSTSDTSRPSVPLGPLGAGAAHQVPYPSPTGGPISTSTFSEVCDGTGRDAKRSTRHFCRHPSSPRPALSPPVRPTGPWTVHISLLPHASVPMPFERNTTAYQRCLSRGPASHGSRARPRRGLVSGGRREGVRAVPPRARVDAAAGEACATPPCCPASRLLAAAGTTLKRRIPRPGPGDPACDHEFLRRHCAVVDPHGVIDSLYIAMRNHTISWHTLRHAPVFMEGLEDCWAYDPLLDKDPFDDADIAVDDEARPAAGDITTALPPSAGGVAGLKRPLSEMSRSNSFGSDGNSSGAAAALQGSSSSSSSSSSSSSSSSSSSSSSSNTTSTAAATGDMMGDEARVKRPCPAPPSASIVEIRRRDTIKTV

SEQ ID NO: 3788 - DNA, 1404 bp, Myceliophthora thermophilia
atgagaatcgggtgcctacaattcgcgccaaaggtaggcgacgtaaccaacaacatcgcgcaagccgaggccgtcctctcgagtgcggatcaggatgagctgaagaatctggaccttctcgtcctccccgagatggccttcagcggatacaatttcaggtcgcaagaacacattgcgccctaccttgagcctgcgggagccggccctagctcgcagtgggcgcgcacggctgcacgcaagtacaagtgcaccgttgccgttggctatccagaaaaggtagagaccacggggcaagagccggaaaactataactcgctcattgtcgtcgatcgcgatggcgagacgctggcaaactatagcaagtcgttcctctactacacggacgccacctgggcccgcgaaggccggggcttctacggggggaagctgggcgacttgggccaaaccgccatggggatatgcatggatatcaatccctacaagttcgaggccccctgggacgcctacgaatttgccttccacatccttcgcgtgcgagcgaacctggtcatcctgtccaccgcgtggttgaccaacgacgagcgcaccggctttctggcctgcccggacgcgcccgacctgtacacgctcacctactgggcccagaggctcgagcccgtcatccggacgggggcctccgaggagaccgtcgtggtgttcgccaaccggtccggcgtcgaggatgaagccacgtacgccggcaccagcaccgtcctcggcatcagggacggccaggtgtccgtgtacggcatcctcgggcgcggcgtggaggagctgctggtggtcgacacggacaaaccgccgctcgggagactcgtatatcgtccggcggttcccggcgacggctcgccgtccccccggcgttcggccccggaggaggacacgagagacgggaggcggccgccgggagacgccgggtcagggccggggccggggtcgggcccgcggcccgcgcccggctacgcggactccccgactcttccaccgggacccgcgccttccgccagaacccagaccagcgccctcccaacaacagcaagccgccgccgactaacagccgcgaaagccgccggtgccgaacacaagccggccggcagcacccacccccgaccgaaactcaccctccaaaccgacctcccccggctccgcacaccaccggccgcctcggcggagctggacccgaccggacacggcccgtcagcctcccactgccccgggcgttccgacatggcggcggcggcggcccgcggtgccgtcttctccctgcggcagcgcggtgatacgggtcgccgcgagcccgagcgtcctcgccggttgggggcagatggtctgcgtgtagggaacgggcgaggcaaggttgtttaa

SEQ ID NO: 3789 - protein, 467 aa, Myceliophthora thermophilia
MRIGCLQFAPKVGDVTNNIAQAEAVLSSADQDELKNLDLLVLPEMAFSGYNFRSQEHIAPYLEPAGAGPSSQWARTAARKYKCTVAVGYPEKVETTGQEPENYNSLIVVDRDGETLANYSKSFLYYTDATWAREGRGFYGGKLGDLGQTAMGICMDINPYKFEAPWDAYEFAFHILRVRANLVILSTAWLTNDERTGFLACPDAPDLYTLTYWAQRLEPVIRTGASEETVVVFANRSGVEDEATYAGTSTVLGIRDGQVSVYGILGRGVEELLVVDTDKPPLGRLVYRPAVPGDGSPSPRRSAPEEDTRDGRRPPGDAGSGPGPGSGPRPAPGYADSPTLPPGPAPSARTQTSALPTTASRRRLTAAKAAGAEHKPAGSTHPRPKLTLQTDLPRLRTPPAASAELDPTGHGPSASHCPGRSDMAAAAARGAVFSLRQRGDTGRREPERPRRLGADGLRVGNGRGKVV

SEQ ID NO: 3790 - DNA, 1644 bp, Myceliophthora thermophilia
atgaggattgcttgcttgcagtttagtccccaagtcggcgatgttgacgataatttgaaccgcgccgatgcggttctggaccgtgtagacccggaggaactcgatagtctcgatctactcgtcctcccggagctcgccttcactggctacaacttcaagtcactccaggacattgcccccttcctggaagaagtcgggtcaggcatcagttcgctgtgggcgcagacgaccgccctcaagcacgactgcaccgtcgttgtcggctaccccgagaaggtcgacgtcccggaaaagtggccggcatctcccggatgctacaactcagccgtcatcgtcaatggcgagggcgatacggtcggcaactacaggaagtccttcctctattacaccgatgagacctgggctctagagggcgcaaatggcttctttgaaggcgagatacccaagctcggaagtgtcgcgttgggtatctgtaccgatctcaacccctacaaactcgaagctccctgggacgcctttgagtttggcttccacatcttaaaatcagaggcgaaccttgtaattatgtccatggcctggcagacgcaccacgaccgcagtgtcttcaatttcaacccggccgaaccggacctcgagacactcgtctactgggttcagcggctcgagcccctgatccgtgccgacacggaggaagaaatcatcgtcgtcttttgcaacagagccggctccgaggaggaagttacatatacgggtaccagcgctgttattggcatcaggcgaggcgaggtttttgtctacggcgtccttgggcgcggagtggacgagctgctcattgtcgacacggaccagccgcccatgagcaagctcacggatgccgatgccgttgcgggggacgaggaagctgttgcagaggagaagaaggctccagacacggagatcaaaggcggcttgccggcgcccccaattccggaaaaccgtcactcaagagagagcgaagtgactccgcgtcatctcgcgagcccaggactctcgagtccccggcagcctacctctcccaggctgccttggttggcacaacccactcagcctggagagacgcccaccgacaaccgctctccaacccgcctacagatccccaccagaccgccggccgacgaagtatacactgccatagacaccgccttcacggacgacaacatcataattgacactcctgccatggcgcataccccggcttttgcacgacggctgcagcgccccacgttgaccatcccggcgtcgcctggatggcggtttcccagcaagcagagcccgtacccgtggcagcaccacgacggatcccactcgtcggtgttcggtgcgggcgctaccatgacgcccatcacgccgttcgacgaggacggctggagttcgacgccgatcgaccagaaggcgccgccgcaatggttctggagacatgagccgacactctcagcactgaaagagtcggccgtggaggaagaagagaaggaaaacgggaaaggaaacaggacgcatctgatgccaggacccatgaatcatctgactatcacacaagagctcaacaagcagaaccagaagagcgtgttatggattggaagacgcaagaaggaggagaagatgtaa

SEQ ID NO: 3791 - protein, 547 aa, Myceliophthora thermophilia
MRIACLQFSPQVGDVDDNLNRADAVLDRVDPEELDSLDLLVLPELAFTGYNFKSLQDIAPFLEEVGSGISSLWAQTTALKHDCTVVVGYPEKVDVPEKWPASPGCYNSAVIVNGEGDTVGNYRKSFLYYTDETWALEGANGFFEGEIPKLGSVALGICTDLNPYKLEAPWDAFEFGFHILKSEANLVIMSMAWQTHHDRSVFNFNPAEPDLETLVYWVQRLEPLIRADTEEEIIVVFCNRAGSEEEVTYTGTSAVIGIRRGEVFVYGVLGRGVDELLIVDTDQPPMSKLTDADAVAGDEEAVAEEKKAPDTEIKGGLPAPPIPENRHSRESEVTPRHLASPGLSSPRQPTSPRLPWLAQPTQPGETPTDNRSPTRLQIPTRPPADEVYTAIDTAFTDDNIIIDTPAMAHTPAFARRLQRPTLTIPASPGWRFPSKQSPYPWQHHDGSHSSVFGAGATMTPITPFDEDGWSSTPIDQKAPPQWFWRHEPTLSALKESAVEEEEKENGKGNRTHLMPGPMNHLTITQELNKQNQKSVLWIGRRKKEEKM

SEQ ID NO: 3792 - DNA, 1239 bp, Myceliophthora thermophilia
atggctgatctgcagggccgcaagatcttcaaggtcttcaaccaggacttcattgtcgatgagagatacacggtgaccaaagagctggggcagggagcttatggcattgtctgcgccgccgtcaacaaccaaaccaacgagggtgtcgccatcaagaaggtcacaaatgtcttcagcaagaagatcctcgccaagcgcgccctgcgcgagatcaagctcctgcagcacttccgggggcaccgcaatattacctgtctgtatgacatggacatccctagacccgacaacttcaacgagacatacctctatgaggagttgatggagtgcgacctggcggccatcatccggtccggccagccgctaaccgacgcccacttccagtctttcatctaccagatcctgtgcggcctcaagtacatccactcggcgaacgtgctgcaccgcgatctcaaaccgggtaatctgctggtcaatgccgactgcgagctcaagatttgcgactttggcctcgctcgcggcttctcgatcgaccccgaggagaatgccgggtacatgaccgagtacgtggcgacgcggtggtatcgcgccccggagatcatgctgagcttccaaaactacaccaaagcgatcgacgtctggtccgtgggttgcatcttggccgaactgctcggcggccgcccgttcttcaaaggccgcgactacgtcgaccagctgaaccagatcctgcacatcctgggcacgccaaacgaggaaaccctctcccggatcggctcgccccgggcgcaggaatatgtccgtaacctgccctacatgtccaagaagccgttcgcgcagctcttccccaacgccaacccggacgcgcttgacctgctggaccgcatgctggccttcgacccgacgcgccgcatctcggtcgaggaggcgctcgagcacccgtacctggccatctggcacgacgctagcgacgagccggactgccccaccacgttcaacttcgactttgaggtcatcgacgacgtcaacgagatgcgcaagatgatcctcgaggaggtcttccgcttccgccagctcgtccgcaccgtccccggctcgaccccccacgcccacgcccagcccgccgcgcccgggcaggtgccgatgccgagcggggggcccaaccaccagtggaaggccgatgaaccacggccggaggagtacgggactatgcagggtctggaggccgagctgggaggcagatga

SEQ ID NO: 3793 - protein, 412 aa, Myceliophthora thermophilia
MADLQGRKIFKVFNQDFIVDERYTVTKELGQGAYGIVCAAVNNQTNEGVAIKKVTNVFSKKILAKRALREIKLLQHFRGHRNITCLYDMDIPRPDNFNETYLYEELMECDLAAIIRSGQPLTDAHFQSFIYQILCGLKYIHSANVLHRDLKPGNLLVNADCELKICDFGLARGFSIDPEENAGYMTEYVATRWYRAPEIMLSFQNYTKAIDVWSVGCILAELLGGRPFFKGRDYVDQLNQILHILGTPNEETLSRIGSPRAQEYVRNLPYMSKKPFAQLFPNANPDALDLLDRMLAFDPTRRISVEEALEHPYLAIWHDASDEPDCPTTFNFDFEVIDDVNEMRKMILEEVFRFRQLVRTVPGSTPHAHAQPAAPGQVPMPSGGPNHQWKADEPRPEEYGTMQGLEAELGGR

SEQ ID NO: 3794 - DNA, 2181 bp, Myceliophthora thermophilia
atgggtcatctcgtgacggttgcgacatgtagcttgaaccaatgggttctcgattgggaagggaaccttgcccgtatcatcgagagcatccaccaggcaaaggcggccggtgcacgactccgcgttgggcctgaactcgaaatctgcgggtactcgagcctggatcactttcacgagctcgatgtttacacgcacagcctggagatgctccgccagcttctgctggacaagagcactcatggcatcctcctcgacatcggcatgcccatccttcaccggaacctcaggtacaactgccgcgtcatctgcctcgacggcaagatcctcctgatcaggcccaagatgtggctcgccaacgacggtaactaccgcgagatgaggcatttcaccccctggatgcgcccgcgggagacggagctcttccacctgcccaagatgctggccgagctgcagggagagactcacgtcctctttggcgatgctgtcatctccacccccgagaccgcctttggcgccgagacgtgcgaggagctcttcacgcccaaagctccacatatcgacatggcgctagacggtgttgagatcatcaccaactcgagcggcagccacttcaccctgcggaaactcgacacccgcctgcaattgatcaccgaggctacccgtaagtctggtggcgtctacctgtacgcgaaccagcaaggctgcgacggcgagcgcctgtactttgacggttgtgccatgatcattgtgaacggcgatgttgtcgcccaggggtctcagttcagcctcaatgacgtcgaggtcgtgaccgccacggtcgatctcgaggaagtgcggtcctaccgcgctgccatctctcgtgccatgcaagcggccgcgtccacggccaagtatcagaggatccagaccccgttcgagctcagctccgaagccgacgactccgatgtcagcaaggcgccaactctgcccatccagccacggttccactcggttgaggaggagattgccctctgcggcggctgctatctttgggattacctccgccggtccggcgccgcaggttatctggtgcccctgagcggggggatcgactcgtgtgcgactgcagtggtcgtctactccatgtgccgcatcgtgatgcaagccgtcgagcaaggaaaccaacaggtcatcgacgacgtcaagcgcatcgccagatacggcggcgagggcgtcctgcccaagacggcccaggaactctgcaaccaggtcttcaccaccatctacatgggcatgaggaagcagagctcgcgcgagacccgccagcgcgccaaggacctctccgaggccatcggcagctaccacgtcaacctcgacatcgatgacgtctacgaggcccagaagaagctcgtcgtcagcgccctcggcttcgatcccaagttcaaggtcgagggcggcacggtgcaggagaacctgacgctgcagtgcctgcaagctagaatcaggatggtcacggcctatgagttcggtcagattctgcccacggcgagggggaggcccggaggtggaagtctgctgattcttggcagtgcgaatgtcggcgagtctggatctctaggcctcaggggctacttgaccaagtacgactgctcgagcgctgatatcaaccccatcggctctatagacaaggccgatctgaagcgcttcatcgcatgggccgagaagagctttgatctgccatgcctccatgacttcctgacggctgtccccaccgccgagctcgagcccatcacgcaagactacgtgcagagcgacgaagcagacatgggcatgacataccaggaactgaccatctttggtcgactgcgcaagctcaacaagctcggtccttttggcatgttccagcgccttgtgcacgactggagcatcgaccgcgagcgcaagccggacgacgacgcaccgtactatacgccggcacaggtcgccgagaaggtcaagaagttcttccactattatgccatcaacaggcataagatgaccacactgacgcccgccctgcattgcaacgactactcgcccgacgacaaccgctttgatctgcgccccttcctgtatccgcccttctggaagagctggagcttcaagcggatcgacatggagcttgaaaagattgagaagaagcgggccagcaagaaacagtga

SEQ ID NO: 3795 - protein, 726 aa, Myceliophthora thermophilia
MGHLVTVATCSLNQWVLDWEGNLARIIESIHQAKAAGARLRVGPELEICGYSSLDHFHELDVYTHSLEMLRQLLLDKSTHGILLDIGMPILHRNLRYNCRVICLDGKILLIRPKMWLANDGNYREMRHFTPWMRPRETELFHLPKMLAELQGETHVLFGDAVISTPETAFGAETCEELFTPKAPHIDMALDGVEIITNSSGSHFTLRKLDTRLQLITEATRKSGGVYLYANQQGCDGERLYFDGCAMIIVNGDVVAQGSQFSLNDVEVVTATVDLEEVRSYRAAISRAMQAAASTAKYQRIQTPFELSSEADDSDVSKAPTLPIQPRFHSVEEEIALCGGCYLWDYLRRSGAAGYLVPLSGGIDSCATAVVVYSMCRIVMQAVEQGNQQVIDDVKRIARYGGEGVLPKTAQELCNQVFTTIYMGMRKQSSRETRQRAKDLSEAIGSYHVNLDIDDVYEAQKKLVVSALGFDPKFKVEGGTVQENLTLQCLQARIRMVTAYEFGQILPTARGRPGGGSLLILGSANVGESGSLGLRGYLTKYDCSSADINPIGSIDKADLKRFIAWAEKSFDLPCLHDFLTAVPTAELEPITQDYVQSDEADMGMTYQELTIFGRLRKLNKLGPFGMFQRLVHDWSIDRERKPDDDAPYYTPAQVAEKVKKFFHYYAINRHKMTTLTPALHCNDYSPDDNRFDLRPFLYPPFWKSWSFKRIDMELEKIEKKRASKKQ

SEQ ID NO: 3796 - DNA, 1215 bp, Myceliophthora thermophilia
atgatcgatctgggacttgcccgcgtcggccgtctcgtccagcacacgccgcagacatggaaagccatacatgtggctggcacaaacggcaaaggctcaatatgtgcctacctctcggcaatgctctccgccagcggcctttcacatgcccggttcacgtcgccccatctcattgatcgttgggactgcatcgccatcaacggcagacccgtgccggaagccgtgtttcgggacgccgaggaggtggtcaagcagagggacagggacggtcggattggcgcgacggaattcgagctgctgacggcgacggcatttgaaatcttccatcggcagaaagtcgagtatggggtggtcgaagttggcttaggcggcaagctcgacgccacaaatgtgctgaagcaaaaggcggtcaccgtcatcgccaaaattgggcttgaccaccaatccttcctcggcagcacaatcgaggaaatcgcccttcaaaaggccggcatcatgcgtcccggcgttccctgtgtggtagatgccagcaaccagccatccgtcctgagtgtgatggaaaagcatgctcgggcggttggggcagatcttcattacgcctcgaccgccggtgttaccgatgccgtggccggcgagaagtttgagccccaccagatacagaacctggcgtgtgcacatacggctttttgcctggcgcgccccgggcatgagcagcccctcgctgatttcctgccggcgatccgacatgcgcagtggccgggccggctgcagaaagttgacatctccaagatcacgggccggcagcaggaggtgcttctcgacggagcccacaaccctcaatcggccgaagtcttggcccagtacgtggaaaagcacctgcgttcccgagacaagcccattacctgggttctggccgctacgcaggggaaggacatgaatggcatcttctctctgcttctcaaacccggcgaccaagtcacggctgtccgtttcggacccgtcgacggaatgccgtggatcaagcctgcggaccccgctgagttgctcggattagctgttcgacatggcgcacaggaagcgaccatccacaatgctggtgatgatgttaagggggcaatgatatgggcgtctcaggttgccaaagatgggcctatggttatctccgggagtctttacctagtgtcaagcgtcttgagggctttgcgggactcgtga

SEQ ID NO: 3797 - protein, 404 aa, Myceliophthora thermophilia
MIDLGLARVGRLVQHTPQTWKAIHVAGTNGKGSICAYLSAMLSASGLSHARFTSPHLIDRWDCIAINGRPVPEAVFRDAEEVVKQRDRDGRIGATEFELLTATAFEIFHRQKVEYGVVEVGLGGKLDATNVLKQKAVTVIAKIGLDHQSFLGSTIEEIALQKAGIMRPGVPCVVDASNQPSVLSVMEKHARAVGADLHYASTAGVTDAVAGEKFEPHQIQNLACAHTAFCLARPGHEQPLADFLPAIRHAQWPGRLQKVDISKITGRQQEVLLDGAHNPQSAEVLAQYVEKHLRSRDKPITWVLAATQGKDMNGIFSLLLKPGDQVTAVRFGPVDGMPWIKPADPAELLGLAVRHGAQEATIHNAGDDVKGAMIWASQVAKDGPMVISGSLYLVSSVLRALRDS

SEQ ID NO: 3798 - DNA, 810 bp, Myceliophthora thermophilia
atggctcccactcacctcattatcgtttgcggacatgcagtttggatcggcggtcccaaaaatggttgggacgaagcagagtggctcattgagggcttccagcgaggggaaacgcccaccttcatcgagcacatcaaagctggtgtgagactcctccaacaagacggcgacgccacgttggtgttttccggcggcgcaacccgcgagcaggtctccctctcggaagcccggagctactacaatctcggccgcgccaacaagtggttcggcctcttgccatcgggcggcccctccacgccgcacccggcgcccgagtcccgcatgctgctggaagaacgagcgctggactcgtacgacaacgtgctcctgtccgtcatcgccttctggcggcggcacgccgtctggccgcagcgcgtgaccattgtcagtcacgagttcaagcgcgagcgcatcgtcgacggccattgcgcggcgatcgggttcccgctagagaaggtcgccttcgtcgggatcaacccgcccggtgtggagccggcgggctcggcgtcgtcgggggcatcggacgagaagagggaggcgatgaaaggcgtgcagctggcgctgggacagtgggcggatgatccccacggggtgggaagtcagctcatggggaaaaagatggaacggaaccactggggaactcggcaaccgttgtttgacagtgacgaggagaggcagaggagcggggttgctactaggtggctctgggacgggatccatgaggggttggttccgggggtgaagatgccctggggaggggagtcgaagtag

SEQ ID NO: 3799 - protein, 269 aa, Myceliophthora thermophilia
MAPTHLIIVCGHAVWIGGPKNGWDEAEWLIEGFQRGETPTFIEHIKAGVRLLQQDGDATLVFSGGATREQVSLSEARSYYNLGRANKWFGLLPSGGPSTPHPAPESRMLLEERALDSYDNVLLSVIAFWRRHAVWPQRVTIVSHEFKRERIVDGHCAAIGFPLEKVAFVGINPPGVEPAGSASSGASDEKREAMKGVQLALGQWADDPHGVGSQLMGKKMERNHWGTRQPLFDSDEERQRSGVATRWLWDGIHEGLVPGVKMPWGGESK

SEQ ID NO: 3800 - DNA, 1647 bp, Myceliophthora thermophilia
atggccgaccgctacatccccgagcaccgccgcacgcaattcaaggcgaagagcaccttcaagcccgaggagctgcgtcgccgccgcgaagagcagcaggtcgaaattcgcaaagcgaagcgtgaggagaacttggccaagcgtcgtggtattggcactggcgaggaccggcccggcgcctctttgggtgccgctcccgacagcgacgatgagaacgctccgagcgagacccagcttaatgaggacctcccccagatggtcgctggcgtcttctcagaccagattgatcttcagattcaggccaccaccaagttccggaagctgctcagcaaagagcggaaccctcccattgaggaagtcatcaagaccggcgtcgtgagccgtttcgtcgagttcctgcggtctccccatacccttgtccagttcgaggctgcctgggctctcaccaacatcgcttccggctcggcctcccagacgcaggtggttatcgaggcaggcgccgtgcccatctttgtcgagcttctcaacagccccgaacccgatgtcagagagcaggccgtttgggccctgggcaacattgcaggcgacagcccgcagtgcagagattacgtcctgagccaaggcgccctgcgccccctgctcaacctcctcggggacagccgcaagcttagtatgctccggaacgctacttggactctgagcaatttctgccgtggcaagacaccccagccggattggaatacgatccaacccgctctccccatcctcgctaagcttgtgtattccctggatgacgaggttctgatcgacgcctgctgggctatctcttacctgtcggacggctcgaacgacaagatccaggccgttatcgaagcgggcatcccgcgccggcttgtcgagcttctgatgcatgcgtcgacctctgtgcagacccccgctctccggtctgtcggtaacattgtcacgggcgacgacgtgcagacccaggtcatcatcaactgcggtgctcttccctgcctgctgtcgctcctgagcagcaacaaggacgggatccgcaaggaggcttgctggaccatctccaacatcaccgctggcaactcggcgcaaatccaggctgtcatcgatgccaacatcatccctcctcttatccacctgctcacccacggcgacctcaagactcgtaaggaagcatgctgggcgatcagcaacgccacgtctggcggtctgcagaagcccgaacagattaggtacctggtcaaccagggatgcatcaagccgctctgcgaccttcttgcttgccccgacaacaagatcatccaggttgcgctggatggcttggagaatattctcaaagtcggagagctcgacaagcaggccgcgggcgagggcgccgacgcgattaaccgttatgcgctgtatatcgaggagtgcggtggcatggagaagatccacgattgccagaccaacgccaacgaggagatttacatgaaggcctacaacatcatcgagaagtacttctcggacgaagacgaggctgcggatgatgctatgggtcagaaccagcaattcggcttcggtgccgcgaacggcgctcagcagggtggcttcaatttcggcgccaacggcgctgaatcgatggatatgtaa

SEQ ID NO: 3801 - protein, 548 aa, Myceliophthora thermophilia
MADRYIPEHRRTQFKAKSTFKPEELRRRREEQQVEIRKAKREENLAKRRGIGTGEDRPGASLGAAPDSDDENAPSETQLNEDLPQMVAGVFSDQIDLQIQATTKFRKLLSKERNPPIEEVIKTGVVSRFVEFLRSPHTLVQFEAAWALTNIASGSASQTQVVIEAGAVPIFVELLNSPEPDVREQAVWALGNIAGDSPQCRDYVLSQGALRPLLNLLGDSRKLSMLRNATWTLSNFCRGKTPQPDWNTIQPALPILAKLVYSLDDEVLIDACWAISYLSDGSNDKIQAVIEAGIPRRLVELLMHASTSVQTPALRSVGNIVTGDDVQTQVIINCGALPCLLSLLSSNKDGIRKEACWTISNITAGNSAQIQAVIDANIIPPLIHLLTHGDLKTRKEACWAISNATSGGLQKPEQIRYLVNQGCIKPLCDLLACPDNKIIQVALDGLENILKVGELDKQAAGEGADAINRYALYIEECGGMEKIHDCQTNANEEIYMKAYNIIEKYFSDEDEAADDAMGQNQQFGFGAANGAQQGGFNFGANGAESMDM

SEQ ID NO: 3802 - DNA, 684 bp, Myceliophthora thermophilia
atgtcaggtatctggggctggttcggcggtggcgccgcgcagaagcggaaagatacgccgaagaatgtcattctcgacctccggacgcagcttgagatgctgcagaagcgtgaggcccatctcacgcgccaaatagaggagcaagagcagattgcgagaaagaatgtcaatacgaacaagacagccgcgaaggcggcgctgcggcgcaagaagatccacgagcacaatctagaacagacactcaaccacattgggacgatcgaacagcaggtgaatgcgatcgaatcggcgaatatcaaccaggaaacattcttggccatgcagcgggctaccgaggccatgaagagcatacacggcaaactgacgccgactaaggtcgacgagacgatggatcaactgcaagagtacaacaggctcaacgaagagattgccgatgcaatgagcaatattgccgttggcccgcaagtcgacgacaccgagctggacgaggagctggaggcactccagcagcaggatctcgaggacaagatgctcgagacgggcaccgtccctgtcgactccatccagcaacgcctgccgacggtggcgaatggagagatcaagggcaaagcacctgcagccgccaccgccgaggacgacgaggaagcagagctcaggaggttgcaggccgagatggctatgtga

SEQ ID NO: 3803 - protein, 227 aa, Myceliophthora thermophilia
MSGIWGWFGGGAAQKRKDTPKNVILDLRTQLEMLQKREAHLTRQIEEQEQIARKNVNTNKTAAKAALRRKKIHEHNLEQTLNHIGTIEQQVNAIESANINQETFLAMQRATEAMKSIHGKLTPTKVDETMDQLQEYNRLNEEIADAMSNIAVGPQVDDTELDEELEALQQQDLEDKMLETGTVPVDSIQQRLPTVANGEIKGKAPAAATAEDDEEAELRRLQAEMAM

SEQ ID NO: 3804 - DNA, 873 bp, Myceliophthora thermophilia
atggcacagcaacagcagagccccctcccggcttacgccgactaccagtacttcctcgtgaccagcccgagccccctggtggcgcacgtcgagatcaaccggccggccaagctcaacgccttccacgaagccatgtggcacgagctgcgggccatcttcgggcggctgtcggtcgacccggacgtgcgcgccgtggtgctctcgggcgccggcgaccgcgccttcaccgcggggctcgacgtggcggccgccagcgagggcggcgtgctggcgtcggccgagggccaggggctggacccggcacgcaaggcggcccgcctgaggcggtacattgccgactttcaggagtgcatcacggcgctggagaagtgcgagaagcccgtcatctgtgtcatgcacggcatcgccatcgggctggccatcgacatctcgaccgccgccgatatccgggtgtgcgccaaggacacgcggttcgccgtcaaggaggtcgacattggactggccgccgacattggcacgctcgcacgcctgcccaaggtggtgggcagccagtcttgggtcaaggacgtgtgcatgacggctcgcgactttgacgcccaagaggcgcttgccgtcggcttcgtcagccaagtgcacgagtccaaggcagccgcgctggccgcggccttcaagacggccgctttgctcgccaccaagagtcccgtggccgtgcaggggaccaaggagctgctaacccacagccgagaccacccggtcgaggacaacctgaggtacacgggcgtttggaacgccgccgcccttcagactaacgatgtgccggccgccctcatgtcgggactgaaaaggaagaagccgacgtttgagaagctatga

SEQ ID NO: 3805 - protein, 290 aa, Myceliophthora thermophilia
MAQQQQSPLPAYADYQYFLVTSPSPLVAHVEINRPAKLNAFHEAMWHELRAIFGRLSVDPDVRAVVLSGAGDRAFTAGLDVAAASEGGVLASAEGQGLDPARKAARLRRYIADFQECITALEKCEKPVICVMHGIAIGLAIDISTAADIRVCAKDTRFAVKEVDIGLAADIGTLARLPKVVGSQSWVKDVCMTARDFDAQEALAVGFVSQVHESKAAALAAAFKTAALLATKSPVAVQGTKELLTHSRDHPVEDNLRYTGVWNAAALQTNDVPAALMSGLKRKKPTFEKL

SEQ ID NO: 3806 - DNA, 303 bp, Myceliophthora thermophilia
atgtcaccaacatatactatgtccgcccacctctgcaagcagatctactcgtcatggcgccaggcgcgacagagctctccagacacgagcccactgccttcgcctcccacggctctcagcaaccgccacgacagcaacacggcgtcctatttcccccggccatcgtcgcccaccgccaacgagaagtactccatggatagcgagcgcaacctgtcttcgcacccgccatcgccttcgctctcgccgtcggggtcgggatcatcagggtcagggtcgagttggcgggggtggggatctcgttag

SEQ ID NO: 3807 - protein, 100 aa, Myceliophthora thermophilia
MSPTYTMSAHLCKQIYSSWRQARQSSPDTSPLPSPPTALSNRHDSNTASYFPRPSSPTANEKYSMDSERNLSSHPPSPSLSPSGSGSSGSGSSWRGWGSR

SEQ ID NO: 3808 - DNA, 261 bp, Myceliophthora thermophilia
atgaccttcccaaaggcagagatgaccggtcggcagcgtggcagcgggaagtgcaatctgcggtgccgcaacagcccattgggcgaaacgggcttcctcgatcgggatctggccatgccatctccccccgaggagacgaccgagcccacagcttgcaggggtcacgagatgaaagggcggagccggtttggatccgtgacgcgcgccatccgagaggaatcgtacaagataggagacccaccggacccgaagaaacaataa

SEQ ID NO: 3809 - protein, 86 aa, Myceliophthora thermophilia
MTFPKAEMTGRQRGSGKCNLRCRNSPLGETGFLDRDLAMPSPPEETTEPTACRGHEMKGRSRFGSVTRAIREESYKIGDPPDPKKQ

SEQ ID NO: 3810 - DNA, 381 bp, Myceliophthora thermophilia
atgggatccgcccctccgtcgttccgcctccgtctggaaaatcgggaggacaagaacggtcccggcaggggccgaagcgaccccgctgccgcgccgcccttgaccaatgcaagggacaagttcatcatctcacaggggcaacaaactgccatgatcgatcccaaaaacaaactcctttggccctgcgcaggaacccgcgcgtttcactcgctcggcgccgctaagatgcagcagcaggtcacctgggctgagcccgtgccgttccttcagccccaactgaaaaagccgccgatgatgctgcctcgatcgcccttcctcccaccccccgctgcagtgagatcgatgaacatgggcttgttatcgctgctgacgggccgatga

SEQ ID NO: 3811 - protein, 126 aa, Myceliophthora thermophilia
MGSAPPSFRLRLENREDKNGPGRGRSDPAAAPPLTNARDKFIISQGQQTAMIDPKNKLLWPCAGTRAFHSLGAAKMQQQVTWAEPVPFLQPQLKKPPMMLPRSPFLPPPAAVRSMNMGLLSLLTGR

SEQ ID NO: 3812 - DNA, 432 bp, Myceliophthora thermophilia
atgtcgcccatcaagcaccccagtgacgctgatcagtcctcaccgggggggggggggggaggaggaatcggtgggagcaacgacggcggtttcgacccggccctcctgacgccggccgcgcctggcttcgggggcggcagcaggtatgtcgggccccacccagccccgtcctcctcctcctcttcctcctttccctcgtcgttgtcgttttcgtcgtccgccgtgaggatcgagagcttcgtcaccacgttcgaaccggccaggggaggtgaggcagcggtgggtggtggagaggggggcaagtacgggccaacctttttgctgcccgacatgaaacgggaacgggtcggaaaagggacgacgagcgaggaggggatgctggtgtcggatagggtgtgccaggttttgacttcttcgaccacgagctcctag

SEQ ID NO: 3813 - protein, 143 aa, Myceliophthora thermophilia
MSPIKHPSDADQSSPGGGGGGGIGGSNDGGFDPALLTPAAPGFGGGSRYVGPHPAPSSSSSSSFPSSLSFSSSAVRIESFVTTFEPARGGEAAVGGGEGGKYGPTFLLPDMKRERVGKGTTSEEGMLVSDRVCQVLTSSTTSS

SEQ ID NO: 3814 - DNA, 1959 bp, Myceliophthora thermophilia
atggccggatccacggaccagcagagcggtagaagggaagcgagcgactcggtcgaccgccccggcagccccgggacccaatcgccgatcccacggattgtcgtcgagccagccgacgacaggattggcgacaacggacctcccccggctacccgccagtccgcggctccgagagaacgccctcgcctctcggagcgacccttccttgaggtcccaagcccccctcggccttcccaccggcgcctcggttcgcagcagatcggttcctcccagcccagccgcgagcccagccgcagccgcattccccagtcgctgaccggcacactcggtctgcccccgctgatgaccgggcccatccaccccctccggatgcacccggtccacctcacaggctcgtcgagcatgcccatcgccgacaccacaggccgccctttgggcctacgctacgacggcaacccgtacacgcttcaaggaaaggcagtcatggagaaggtcgacaagatgctggccgccagcagggccctaaagcccgagaccgagaggagctccaagggctctaggtccggggctgcgggggcgatgggcttcctgaagaagctccgatccccctcccagctcttctctaagcctaagccgcgagtaccgatcaagccgcaccagatccggcacatcaccggcagcctcgagccgcttccgctgccggagcagaccaggcatgtccccagcgtctgcctccgccgcaacgagctaggaaacctcaagcgggaaaaagccctgcgcgtgctaggagagacgcctaaccttgaccccctcccgtctatagacctcgacccggccgctacctccccggatctatccttctcgtcaacctccatatctacagaggatgaccaccccttcttctcgcgttcgggcaccactaccaccgcggatatcgccaccgataccgctactaataccatcaccaccgccaataacaataccaccactaccactatggcagcagcagtaacaacagagaccgtagcagagacagctacactaagcggccgagcgcccgcagggtttgagacgcgccccctccgcgccgcaaggtccgagagcgctctgccattatcgtcgttatcgtcgtcgtcatcgacgatgttaccgcgggtgagccaccagcgccagctccggcccttcctcctacccgccctcattctcgcgcgggagatggaggcgagggccgaggctgccgaggccgcggcggcagccaagctcgcgaggcttgcggcggccgcggcacgtaataatggtggtcatagtggtggtaatgctaccactgtcgttagtaggtcaggttcttcccggggagtcacttctggtgccggcgcgggtacggctgccggcgcgggtgcaggcatccgtacggcccctgaaagcccgacaatggcggcgcgcactaccactactactattaccaccaccactagcaacagcaccaccagcagcacaaatgccggcgcgggcatgcacaccagcacgcgcgcgttcagacgacgatcgcgtagcgttcccagcctcgacgccctgctaaccacgcctccgctccagggacgcccgcgcccgcacccacaggccgacgcagagggcgcagggcccagaagcgcggctggtgctggtgctggtgctggtgctggtgctggtgctggtgccgccgccgctgtcgctcctcccccgtcgcggtgggtgagcccgcgtgccggcgggggcgaccgggtcgccaccaaacgccaccccacgcccgcgctgggggacctggcggcgctggagcgggcgctgcgcgagaggttccccggtctcgcgggcgaggggtcgcgggtggtggtggtggaagagaacgaggaggaggtggaggaagaggaggaggaggaaggtaaaccgggggacttacagccgccggcgggatatttctag

SEQ ID NO: 3815 - protein, 652 aa, Myceliophthora thermophilia
MAGSTDQQSGRREASDSVDRPGSPGTQSPIPRIVVEPADDRIGDNGPPPATRQSAAPRERPRLSERPFLEVPSPPRPSHRRLGSQQIGSSQPSREPSRSRIPQSLTGTLGLPPLMTGPIHPLRMHPVHLTGSSSMPIADTTGRPLGLRYDGNPYTLQGKAVMEKVDKMLAASRALKPETERSSKGSRSGAAGAMGFLKKLRSPSQLFSKPKPRVPIKPHQIRHITGSLEPLPLPEQTRHVPSVCLRRNELGNLKREKALRVLGETPNLDPLPSIDLDPAATSPDLSFSSTSISTEDDHPFFSRSGTTTTADIATDTATNTITTANNNTTTTTMAAAVTTETVAETATLSGRAPAGFETRPLRAARSESALPLSSLSSSSSTMLPRVSHQRQLRPFLLPALILAREMEARAEAAEAAAAAKLARLAAAAARNNGGHSGGNATTVVSRSGSSRGVTSGAGAGTAAGAGAGIRTAPESPTMAARTTTTTITTTTSNSTTSSTNAGAGMHTSTRAFRRRSRSVPSLDALLTTPPLQGRPRPHPQADAEGAGPRSAAGAGAGAGAGAGAGAAAAVAPPPSRWVSPRAGGGDRVATKRHPTPALGDLAALERALRERFPGLAGEGSRVVVVEENEEEVEEEEEEEGKPGDLQPPAGYF

SEQ ID NO: 3816 - DNA, 729 bp, Myceliophthora thermophilia
atgctcggcgtcaacgacaacaccaagagattattgaaactgcaagttggcttgtgcagcgccaggttcgaggacgatggaaggagcaggacgccggacagagtcaggcagcctcatgttctgcctgcgcctgcgccttctggtcacaagttgggcagactcgagcaggccaatggcaagcttgctcgccatcggagagtttgcggaagcaaggtaacgttatggtcacgtgcgttggcggaaccatggatttgtcattggccactgaagaccaccccattcattacccgccaacaacaaggagcagactcgctctccccgaccaaccccaacaagtacactgcggacgacaagaagtacactacggacacgccattgctcgattgtcacggtaacacaagtccacgaccatcccgctatcctctcagcaccctccttgctcactgtgcgctacccttcacgggccagttaaagtccctcctgcccttgtattatctcgttcccctggctggccccgtagttgttcgacatggtggcaaggagcccagcggcgagtacacagttagagatgatggtgggtccctcgaagatcttgggcgattgacacgggcctttttttcgtgcggagccaggcgaccctcgcggcccgttcccttgcggaaatgccccggcccgaagcctcgaacaaatcgtggttcgggtgattatgtatctaagcctcaatattag

SEQ ID NO: 3817 - protein, 242 aa, Myceliophthora thermophilia
MLGVNDNTKRLLKLQVGLCSARFEDDGRSRTPDRVRQPHVLPAPAPSGHKLGRLEQANGKLARHRRVCGSKVTLWSRALAEPWICHWPLKTTPFITRQQQGADSLSPTNPNKYTADDKKYTTDTPLLDCHGNTSPRPSRYPLSTLLAHCALPFTGQLKSLLPLYYLVPLAGPVVVRHGGKEPSGEYTVRDDGGSLEDLGRLTRAFFSCGARRPSRPVPLRKCPGPKPRTNRGSGDYVSKPQY

SEQ ID NO: 3818 - DNA, 1497 bp, Myceliophthora thermophilia
atgccgatatcgagaaccgccggtctgcggtccgcctggatatcacggctcgcgcaaccgttcacgtctcccctcggatcatcccgcagcggctgccgccaacatggcccatccatttccgcgacactgcgggctagtcatcaggtccgtatgaagtcgacggcaccggccgaccatgaaccggaacactcttcgaagcagacagggcagacaaaaccgccttctccctccctgaagagcatgatatggcatggcatcaagtccgacgccagtcgcgcctggtacgtgataagaaacaccagcttccgggaggttatgcggcggaatccgggggaggcgtttggtgctatcgtagcagtggccggcgccatcgcggtcttcatctactgcgtctacgcatactacacctacttttacagccgccaattcacgcgataccccgagccagtggcgcaagccttgcggaaagcgctctacttcagcaatcacgacccggacccgcagcgcgcgctgaaatactataagcaggcgctggagctgtgcgaccaagaggggctggatcacttttcggacgacgtcatgggcatcaagattcaggtggccgcgtggctcgagaagattgagagctaccacaacgccatcaccgtgctggagaacctgctgaatgactgcaagcgctgggtggaagtcatggagaagagcgcggccgaggggacgctgccaaagcttgagcccgtccctgctgccaaagagggcgaggccggtgttcccgagcagccgagagagggctggtgggcgaagcggacgaggctcctggccaaggccgtcagcatcagcgtcaagctagccaatctctactcggacgagcacgtgttggagcgggaggtagcccacgagcggcttgtctgggcggtcgagaccgccctgaaggagacgcagaggcgcgctaaggaggggctcaaggacggggagggcccctggatgagtctagaggagataggtggaagcttggaagctcttgcgtacagttaccaggaaaagagtcagtatcatctggccgtcccgctcttcttccaggccctccgcttgtgtcaggatccctgccacatcgccctgttgatgaacaacatctcgaccagcttcgcggagcacccgctcatcccgcctggtgacgcgcccgttcacgccatgatggaagagtccaagacctgggctacagcagcggaacaacgcgcatcctaccttgcagctgcccagcggtgggcgcagaacgccattgagcacgcttcccagccgcaaggcgaccggcggacgtcggaatgcgaccgagcctgcgctgttgcgctctccaacctgggttcggtgctggcgatgctaggcaagaacagcgaagcgcgcgcaaagtacgagcaatcgatcgctctgagcaagaaatttggctttgacgactacgcggccgaggccgaggccaggctccgaagcctgcccgaagcatga

SEQ ID NO: 3819 - protein, 498 aa, Myceliophthora thermophilia
MPISRTAGLRSAWISRLAQPFTSPLGSSRSGCRQHGPSISATLRASHQVRMKSTAPADHEPEHSSKQTGQTKPPSPSLKSMIWHGIKSDASRAWYVIRNTSFREVMRRNPGEAFGAIVAVAGAIAVFIYCVYAYYTYFYSRQFTRYPEPVAQALRKALYFSNHDPDPQRALKYYKQALELCDQEGLDHFSDDVMGIKIQVAAWLEKIESYHNAITVLENLLNDCKRWVEVMEKSAAEGTLPKLEPVPAAKEGEAGVPEQPREGWWAKRTRLLAKAVSISVKLANLYSDEHVLEREVAHERLVWAVETALKETQRRAKEGLKDGEGPWMSLEEIGGSLEALAYSYQEKSQYHLAVPLFFQALRLCQDPCHIALLMNNISTSFAEHPLIPPGDAPVHAMMEESKTWATAAEQRASYLAAAQRWAQNAIEHASQPQGDRRTSECDRACAVALSNLGSVLAMLGKNSEARAKYEQSIALSKKFGFDDYAAEAEARLRSLPEA

SEQ ID NO: 3820 - DNA, 1224 bp, Myceliophthora thermophilia
atgctggccggggagcgcagcgatcagggaggcattggtgccccgagagctcttcgcctgggcggtcgcgacggaccgctgtcgcgcgatggtgctgttgctgccagttcagctgtttggctggaccagctgggttcgcggtacatggaaagtagtttgaaattgctacctgagtaccttaacggccagccagggtggctaaaagaagggacacggtcgggcgctgaagccgacaatggcaaatcagagccgagtcaggcacgcgtgcagcaatcaggcacagcagcggcaggagcaggtcaggtagcacagagaggaagggccaaccttgtgtgtgtacgcagcacgcaggagcgtacactggctatacaggttacactcgtctcggaagagcaaagtatgtcggatgtagatctcctttgggaaaagcacgccctatcggttccccatggtcaaatgaacgagaaggacgtgcgcatctctttgtcgattggctacactacggatactctgtgcataagatcgttagggctgcctgtacgagacccaattcattggagaaggagcatagatagatggtcaagggaccctcagcgacaggagaatgccaagctggcgggtcaaccccaacactctcgattgcacggattacatgccctactaggaggtctcgtgtgggccgctgcgggcgcgatccgcttcggcgctccccgtgtgccttggtccagcacgagacatctggcgtcattatggggttccatgaagtctgaactcgcccgatggcaacctggcccgacattgagagcggcggatgaagttgtcggtgctctccaacttcctcgctttcccgcggcggcaacccaaaggggattcccaactccagcacacatagcagtggaagcaggatgttacgcgatgtatcagccacaagatcccccagtgtcctttctccctgcgttatgcccggtgccgacctacacaaggctcaacatggtggccatgtgccgttcgttgccctgcgagcaccgtcacatcattgcggtcatttgtcactccaagtccatactccggctgccggccgttacggagtacttgggagccatccacccggcccgtgagttggttccgggggggagggatgtggcctccgattggatccacctccatacagcccctgtcactcgatcccgccccaccaacttgctgacctaccttggctgctaa

SEQ ID NO: 3821 - protein, 407 aa, Myceliophthora thermophilia
MLAGERSDQGGIGAPRALRLGGRDGPLSRDGAVAASSAVWLDQLGSRYMESSLKLLPEYLNGQPGWLKEGTRSGAEADNGKSEPSQARVQQSGTAAAGAGQVAQRGRANLVCVRSTQERTLAIQVTLVSEEQSMSDVDLLWEKHALSVPHGQMNEKDVRISLSIGYTTDTLCIRSLGLPVRDPIHWRRSIDRWSRDPQRQENAKLAGQPQHSRLHGLHALLGGLVWAAAGAIRFGAPRVPWSSTRHLASLWGSMKSELARWQPGPTLRAADEVVGALQLPRFPAAATQRGFPTPAHIAVEAGCYAMYQPQDPPVSFLPALCPVPTYTRLNMVAMCRSLPCEHRHIIAVICHSKSILRLPAVTEYLGAIHPARELVPGGRDVASDWIHLHTAPVTRSRPTNLLTYLGC

SEQ ID NO: 3822 - DNA, 168 bp, Myceliophthora thermophilia
atgactatcgacaaaactactaaggacgttatcaaagtagcggctacaagctataaaggcagggatagtaacgcggatagtctcggatatgatggtaacggtaaagacgaacaagcactgtactccgaactggtcactatggccctagagataggtctcgctgaatag

SEQ ID NO: 3823 - protein, 55 aa, Myceliophthora thermophilia
MTIDKTTKDVIKVAATSYKGRDSNADSLGYDGNGKDEQALYSELVTMALEIGLAE

SEQ ID NO: 3824 - DNA, 1683 bp, Myceliophthora thermophilia
atggggccgcccactggagccaccggccgcggtgcgtctcagtcaccaaaacaatccagcaagcaatctccatcccagcaagacacgcagtccgattccaaacgtgacaccgccgtcaaggccgacgagccgaccgataccgagcccgcaaaaccgcttgcccccccgccgcgtccaaaccagcaacatcaaggatcgaacagccccgactacttcgggaacgcgccagcagggtcgctgagtctggagccgaaccccttcgaacaatcgttcagcggcgctccccccgaaactcccggtggcacgaagctgccctctgtcgcagcactcacatccccgtcttctcttcttcccggaaacacgccgttcgcttggggcggtggctccctgcggaccggcccgctcagtccggccatgctatcagggccgacaaatgattactttagcgacacccatcacatccgcggcagctttccgaccccgaacgaatcatccctgcgaaccggtctgacccccgggggcagcgggtccatgttccctgccccaagtccgaccacacaggctatgttcggcctcgccggcggccccagtgcgacgcccggcacactcgacttccaccggactgcgctcagcgctgccgctgctaagcgcgagcaagcccaggcgcatcaacaacaagcgccgcctgcggcgcccacctcgcagccgctggagatgtctaacggagcgcaggctcccaagacagagtcgaaggctcctacagggcccttcgatccccacgataacgacgcggcaaacggtcttttcctgctggcccaggggcggaacagcgctcagccatcctctagccaacagtaccctccggtcccgcctgcacaggtgcaatcccagccgaccacctccgctccggctgcgcagcccctcaacacatctccgcaaatgaacggcgcgccctcgctcacgggcagttcggtcaggggcactagcgaagtcagccaggggtcggaggagagtgaaaccgcacgccccaacacccgcacaagagggaagcgcaactcgggaggtgcagctccgaactcgcggcgcaaggccgaggaaaccactgcaactaaggctcccgcgaataagaagcagaggtcaaacggtggcgcgtcgataagcagcgtggacatggaccattctgaggaggagcgccatgagaagattggcaaggaagagaacaacaacaacaataacagcaacagtaacaataacaataacaacaataacaacaacaacaacaataacaataacaacagcgggccaaaggccaaaatgacagacgaggagaagcggaagaactttctcgaacgtaacaggtttcacagagtggctgcgctcaagtgccgtcagcggaagaagcagtggcttgccaaccttcagtccaaggtggagatgttttctactgagaacgagacactcacccagcaaattacccaactccgcgaggaggtggtgaatctgaaaaccctgctcctcgcccacaaagactgcccagtcactcagcaacagggtctccacaatgcattcatgcagcagcccatggaagccttcaatcctcccatgaatccttatggcatgccacctccgatggcgggtcagcccgtcatggcgggccaggccatgaaccggcggttctcatag

SEQ ID NO: 3825 - protein, 560 aa, Myceliophthora thermophilia
MGPPTGATGRGASQSPKQSSKQSPSQQDTQSDSKRDTAVKADEPTDTEPAKPLAPPPRPNQQHQGSNSPDYFGNAPAGSLSLEPNPFEQSFSGAPPETPGGTKLPSVAALTSPSSLLPGNTPFAWGGGSLRTGPLSPAMLSGPTNDYFSDTHHIRGSFPTPNESSLRTGLTPGGSGSMFPAPSPTTQAMFGLAGGPSATPGTLDFHRTALSAAAAKREQAQAHQQQAPPAAPTSQPLEMSNGAQAPKTESKAPTGPFDPHDNDAANGLFLLAQGRNSAQPSSSQQYPPVPPAQVQSQPTTSAPAAQPLNTSPQMNGAPSLTGSSVRGTSEVSQGSEESETARPNTRTRGKRNSGGAAPNSRRKAEETTATKAPANKKQRSNGGASISSVDMDHSEEERHEKIGKEENNNNNNSNSNNNNNNNNNNNNNNNNNSGPKAKMTDEEKRKNFLERNRFHRVAALKCRQRKKQWLANLQSKVEMFSTENETLTQQITQLREEVVNLKTLLLAHKDCPVTQQQGLHNAFMQQPMEAFNPPMNPYGMPPPMAGQPVMAGQAMNRRFS

SEQ ID NO: 3826 - DNA, 669 bp, Myceliophthora thermophilia
atgccagctttagcctcatccgtcatggatgcgtttcctgacgatacgctcgtccaggccatcacagcgcacgtctcagcttacatgcagaactacgacgcctctcattcctgggaccacatcgagcgcgtcgtcgccatggcacaccacatctacgcccattccgatcccgccttccggtccaccctcgacctgcgcaccatccacctcgccgctctcctccatgacgttggtgatcgcaaatacctgaagcccggcgaggacccgaccacccaggtccagaccctactgctctcccattcgtgcccgcccgacctcgcagctcgggtgcagacgatctgctcggccgtgagctactcgaccgagcgggcggacccggagcgcgtcgcgtccctcgtcgcgacgcacccggagctggccgtcgtgcaggacgccgaccggctggacgcaatcggcgcggtcggcatcgggcgcatgttcacgtacggcggcgccaggacggcccggagcatggccggcaccatggagcacctcgacgagaagctggtcaggctggagggcatgatgaagacgaaggtcggccgggccgtggccaaggtgcggaccgagcggctcatcgtcttcagggggtggtgggacgaggagacgggactcgcggggcggcagtag

SEQ ID NO: 3827 - protein, 222 aa, Myceliophthora thermophilia
MPALASSVMDAFPDDTLVQAITAHVSAYMQNYDASHSWDHIERVVAMAHHIYAHSDPAFRSTLDLRTIHLAALLHDVGDRKYLKPGEDPTTQVQTLLLSHSCPPDLAARVQTICSAVSYSTERADPERVASLVATHPELAVVQDADRLDAIGAVGIGRMFTYGGARTARSMAGTMEHLDEKLVRLEGMMKTKVGRAVAKVRTERLIVFRGWWDEETGLAGRQ

SEQ ID NO: 3828 - DNA, 1023 bp, Myceliophthora thermophilia
atgcctcccccgatcatcgactcccacatccacctctacccctcctctgaggtgtcttcgcttgcctggtgcactcccgaccacccgctcgcggggcagcgctcggttagcgagttcctcgccgccgccaccaccggttcgtcgtcgccggcggatccctctggtggtggtagtggtggtggtggtggtggggggtccctggcgggcttcgtggtggtcgaggaggtggcgtggatgcggcggctggtgacgggccagccgcggccgggcgagggccactcggccgaggacgcccggctgtgcctgggcctggtgccgtgggcgccggtggcgagcgggccggcagagctggggcggtacctggaggaggcggagaaggaggccgggccggagacgtggaggcgggtcaaggggttccggtacctgctgcaggacaaggagaacggggtcgggctggaggaggggttcattgagggcctgaagctgctggggaggaaagggttcgtcttcgaggtcggcatcgatcagcaccggcgcgggagggtgcagctggagcaggccgtcgagatgatcgaccgggcgcacgagggcgtcgaggaagaggacaaggtcgtcttcgtcttgaatcacctctgcaagcctgacctgaccatcatcaaccagaacgatccgtcctacgttgcgtggcgtaccgccatgtttacactcagcaagtgccacaaaacctacatgaagctgagcggttgcttttcggagcttccagacaagcttaaggagcgctcggccgaggacatatttgcagccatcatgccgtggctggcagttgtcgtcgccgccttcggcccgagcaggatcatgttcggcagcgactggccggtctgcacggtgggagtcggcgaggatgcctggaagaagtggcacaaggttgtcgacatggtgtgcgacctggctgggttgagtgagagagaccaggagatgctctggagcgggacagcgaagcaagcatacaagcttgagatttag

SEQ ID NO: 3829 - protein, 340 aa, Myceliophthora thermophilia
MPPPIIDSHIHLYPSSEVSSLAWCTPDHPLAGQRSVSEFLAAATTGSSSPADPSGGGSGGGGGGGSLAGFVVVEEVAWMRRLVTGQPRPGEGHSAEDARLCLGLVPWAPVASGPAELGRYLEEAEKEAGPETWRRVKGFRYLLQDKENGVGLEEGFIEGLKLLGRKGFVFEVGIDQHRRGRVQLEQAVEMIDRAHEGVEEEDKVVFVLNHLCKPDLTIINQNDPSYVAWRTAMFTLSKCHKTYMKLSGCFSELPDKLKERSAEDIFAAIMPWLAVVVAAFGPSRIMFGSDWPVCTVGVGEDAWKKWHKVVDMVCDLAGLSERDQEMLWSGTAKQAYKLEI

SEQ ID NO: 3830 - DNA, 387 bp, Myceliophthora thermophilia
atgtctcttggatcgacaagaacaccggccaatatcctgggggacgctcatgcaaccgccgtgttgaacctcccagccggggtcgcagagctgctatctcagttccagttcggcttggccggctgcctgcatcttgtgcggctcatgacacaccggacgactcaaacgaccgggttgccaccatcaacaggcggcgtcgttctctgcctccttccgaagccaccggtgacggtccgacgaagtcagaagcggccccatacggttgaggcgacgaagattcgtcgtgacaacattcagcacggcgaaggggcgactgccactgctgggtctacacacccggacaccaacaataaccagacctgtacggacaatggcgggcctgattaa

SEQ ID NO: 3831 - protein, 128 aa, Myceliophthora thermophilia
MSLGSTRTPANILGDAHATAVLNLPAGVAELLSQFQFGLAGCLHLVRLMTHRTTQTTGLPPSTGGVVLCLLPKPPVTVRRSQKRPHTVEATKIRRDNIQHGEGATATAGSTHPDTNNNQTCTDNGGPD

SEQ ID NO: 3832 - DNA, 213 bp, Myceliophthora thermophilia
atgggcagcagaagtgtagggcccgggatcagcatcccgatctcgttacccgccgaaccgcttagcgtacccgtactgtacgcgacatcacgaccagctggttttgagcacactagtctagtcgaatttgtcttttggccggttcagtgtctcaaccgacttgaatgtctcaagaaactccttaccgaaagcatcgttggcgtcgacgcttga

SEQ ID NO: 3833 - protein, 70 aa, Myceliophthora thermophilia
MGSRSVGPGISIPISLPAEPLSVPVLYATSRPAGFEHTSLVEFVFWPVQCLNRLECLKKLLTESIVGVDA

SEQ ID NO: 3834 - DNA, 1314 bp, Myceliophthora thermophilia
atgagtttgcggggtttccagaaggggttggcccgcgcgccccaacaaattaaagtcaaactcaacattggcgagcacaccaaggacccagtctacatcgatgccgagcgccggttccaggatctcgagaccgagacgaagcggctgcacgacgagagccgcaagtacttcgaagccatcaacggcatgctcgcgcaccagatcgagttctccaaggccatgacggagatatacaagccgatcagcggccgcatgtcggacccggactcgctcgtggtgcacgggaacccggagggcatccgggcctgcgaggagtacgaggccgtggtcaaggacctgcaggagacgctggcgccggagctcgagatgatcgagagccgggtgatccagccggccaacgagctgctcgacgtggtcaaggtgatccgcaagacggtgaccaagcgcgagcacaagaagctcgactacgaccgccaccgcgccacgctcaagaagctgcaggagaagaaggacaagacggccaaggacgagaaggcgatatggaaggtcgagaacgagctggagcagtcgacccaggacttcaactactacaacgacctgctcaaggaggagctgccgaggctgttcgcgctcgagcgcgaattcatccagcccctcttccagtccttctactacatgcagctcaacatcttctacaccctccacgagcgcatgcagcggatggacattggctacttcgacctgaccctcgacgtcgaggacgccttccacaagaagcgcggcgacgtccaggagcgcgccgaggccctgaccatcgtccgcttcaggacgacgggccagaagcgcccgcccaagtacgccaagccgccgcgcccgggcgccctcgagggccccaagacggccggcctgctcacggcgggggggtcgccttcggcctcgccgtccacgcccgagctcgagccggccaccaccaccacggcctccccggccccgaccgcctcgtaccgccgcccgtcctggccggcggcgggcgccgcctcctactcctccccggacagcaacccgcccccgccctattccccccccctccccggggccggggctcgccgccgccgccgccgccgcggccaagtccaagcccccgccgccgccgccgcccaagcccagggccttgcggagggcgacctcagcttccgcgcgggcgacgtcatcgaggtggtttcgaggacgcggaacgagaacgagtggtggacagggaggatcgggggcaaggaggggcaatttcccgggaattacgtccggttgaatgcatag

SEQ ID NO: 3835 - protein, 437 aa, Myceliophthora thermophilia
MSLRGFQKGLARAPQQIKVKLNIGEHTKDPVYIDAERRFQDLETETKRLHDESRKYFEAINGMLAHQIEFSKAMTEIYKPISGRMSDPDSLVVHGNPEGIRACEEYEAVVKDLQETLAPELEMIESRVIQPANELLDVVKVIRKTVTKREHKKLDYDRHRATLKKLQEKKDKTAKDEKAIWKVENELEQSTQDFNYYNDLLKEELPRLFALEREFIQPLFQSFYYMQLNIFYTLHERMQRMDIGYFDLTLDVEDAFHKKRGDVQERAEALTIVRFRTTGQKRPPKYAKPPRPGALEGPKTAGLLTAGGSPSASPSTPELEPATTTTASPAPTASYRRPSWPAAGAASYSSPDSNPPPPYSPPLPGAGARRRRRRRGQVQAPAAAAAQAQGLAEGDLSFRAGDVIEVVSRTRNENEWWTGRIGGKEGQFPGNYVRLNA

SEQ ID NO: 3836 - DNA, 3003 bp, Myceliophthora thermophilia
atggctggcatcgagcagctcgagatccatagcaagcaattgctaactcgggccgcccgtgccccctcgttccaggcgtacattgttcgatgggtcaaggtcgacgccggtcacacaatatcatggagcgtgcagccgcacaagaaatcaataaactttgcgatcgttaaacaccccggaactggagctacgagcctctcctcccaccccgacgaagtcggcggcctcgagcagcacacgggcggcaccgccgactcgaaagctggtcttttcgccaagaaagatgtcagcaccgcacaagaccagctcgccaagaagggcttcatacccataaaatggcacgggaaatgcgaagcagacaaggtctcggttgggacgtacgatgtcactgaaggtggtatgtttggtctagtcttcgacaacacattttcaaaacagacgtccaagacggcgacatttgtccttctgacctatccgacgggcgcccccccacagacggcgcgtcatctccccaacctccaggctggcccggctgctagcactagcaggtccagcctggggagatctaacagcccgcacctgggcgccgtaccttctgactcggtcgatagcctgcacagccatgctccgggacgcgggcgtgcaatgtcgacattgtcagctggcaagagcgacggagggggttcgagcccctatcacgttggcgtcttgctcaagaggaggcgcaagaagggccagggttacgccaggcgcttcttttccctcgattacacgacgtgcacgctctcgtactaccatcaccgcaactcgtcggccctcaggggtgcgataccgttaagtttagcggccattgccgcggacgagagacggcgcgagatcaccatcgattccggggccgagatctggcacctgagggcgtcgaatgcgaaggagttcaccgaatgggcccggtcgctggagcgggcgagcaagattgctaggggcttggaaaattcggcgaacgagacggtagcccccgggccgcagggtgacgctgcgtcgcagcccgcgccgactgctcgaaatgcgcagcaagaggaggaggatagggattggcaacacgtcgagtctctggtcagccggatagtgggaaccagagatgcgcttaggcgcctggtcaaggacctagcggccgaaaagcggccacctagcaatcacggagcatacctccctcccaatacctcgacggtgcccgaggattctgatggctactccgccggccagcttgacaagcggtcgttttggaagcgcaaagcgagcgccccctcgtctccgatgacgccgcaatccttccaggctgccacgggcgcttcgctagcggtcccaacaacgcccgcggctggcgcaccggttccgaacgggcccaaatcctacggagcgctgcaggagggtcaggagcgggacacgtacgagaactgcgcggcgttgcttaaggacctagactcggtggtcgttgagttttcgacccttctcagcgccagcaagcggaggcggatgccgttgcaagaagccgccgagcctccgaggaggagcattgagtcctcgacgtcgactgtcgaagagttttttgacgccgaggccggcgacctagacaagtcgcagaaccaagtcatgctgatcaaccaccagagcgaggaggagacgacggcttccgacgccgaggaggtatcgatccacgagtcctcctcggcctcgtcgatggacgaggacgaggcaccgcccaccggggacggggtcggcagcctcttcccgacgaagccgaaagcgctctcgccgcttcccattaccgagatggtggcccgacgcaagaccatcccgccggccaaggtcgccccacccagcctgatcgccttcgtccgcaagaacgtgggaaaagacctcagcacgatctcgatgcccgtgtcggccaacgagcccatctcgctcctgcagcggatagcagagcagctcgagtacgcgcagctcctggacgaggcggcccggcagagccaggcgcaccagcggctcctccgcgtggcggcgtttgccatctcccaattcagcaacgggcgggccaaggagcgggcgatccgcaagcccttcaacccgctcctgggcgagacgttcgagctggtccggaccgagagcgaggtgcccggcgggttccggctgctggtcgagaaggtgtcgcaccggccggtgcggctggccatgcaggccgacgcggcgcagtggtcgctcgcgcagtcgccggcgccgacgcagaagttctggggcaagagcgcggagctgaccaccgacgggcgcgtgcgggtgacgctgcgcctgccggacggcagcgaggagtactacagctggaacgtggcgacggtgttcctgcggaacgtcgtcatgggcgagaagtacgtcgagccggtggggacgatgtacgtgtgcaacgacagcacgggcgccaaggcggcggtcgagttccgctccaagggcgtgttcggcgggcgcggagaggaggtgcacgtcgagctcctcggaccggacggcgagcagaccggggtgagcatgagcggcacgtggaccggatcgctcaaggctgccgggcaggaggtgtggaaggtcgggagcctggtggagaacgcggccaacacgtacgggctgacgacgttcgcggcgagcctgaacgagatcacgtcgatcgagaaggggaagctgccgccgacggactgccggctgcggccggaccagcggctggcggagcagggccagctggacgaggcggaggagtggaaggtcaagctggaggaggcgcagcggcagaggaggagggccatggaggagcgcggggaggagtaccggccgaggtggttcgtcaaggcggagacgactcaggacggcgaggaggtgtggcggctgaagggcgggaaggacggctactgggaggagagggcaaaggggtcctggactggtgtgttggatctcttcgctgcttag

SEQ ID NO: 3837 - protein, 1000 aa, Myceliophthora thermophilia
MAGIEQLEIHSKQLLTRAARAPSFQAYIVRWVKVDAGHTISWSVQPHKKSINFAIVKHPGTGATSLSSHPDEVGGLEQHTGGTADSKAGLFAKKDVSTAQDQLAKKGFIPIKWHGKCEADKVSVGTYDVTEGGMFGLVFDNTFSKQTSKTATFVLLTYPTGAPPQTARHLPNLQAGPAASTSRSSLGRSNSPHLGAVPSDSVDSLHSHAPGRGRAMSTLSAGKSDGGGSSPYHVGVLLKRRRKKGQGYARRFFSLDYTTCTLSYYHHRNSSALRGAIPLSLAAIAADERRREITIDSGAEIWHLRASNAKEFTEWARSLERASKIARGLENSANETVAPGPQGDAASQPAPTARNAQQEEEDRDWQHVESLVSRIVGTRDALRRLVKDLAAEKRPPSNHGAYLPPNTSTVPEDSDGYSAGQLDKRSFWKRKASAPSSPMTPQSFQAATGASLAVPTTPAAGAPVPNGPKSYGALQEGQERDTYENCAALLKDLDSVVVEFSTLLSASKRRRMPLQEAAEPPRRSIESSTSTVEEFFDAEAGDLDKSQNQVMLINHQSEEETTASDAEEVSIHESSSASSMDEDEAPPTGDGVGSLFPTKPKALSPLPITEMVARRKTIPPAKVAPPSLIAFVRKNVGKDLSTISMPVSANEPISLLQRIAEQLEYAQLLDEAARQSQAHQRLLRVAAFAISQFSNGRAKERAIRKPFNPLLGETFELVRTESEVPGGFRLLVEKVSHRPVRLAMQADAAQWSLAQSPAPTQKFWGKSAELTTDGRVRVTLRLPDGSEEYYSWNVATVFLRNVVMGEKYVEPVGTMYVCNDSTGAKAAVEFRSKGVFGGRGEEVHVELLGPDGEQTGVSMSGTWTGSLKAAGQEVWKVGSLVENAANTYGLTTFAASLNEITSIEKGKLPPTDCRLRPDQRLAEQGQLDEAEEWKVKLEEAQRQRRRAMEERGEEYRPRWFVKAETTQDGEEVWRLKGGKDGYWEERAKGSWTGVLDLFAA

SEQ ID NO: 3838 - DNA, 822 bp, Myceliophthora thermophilia
atgccgtctgcttcgccaacctggaagtttgcgccgttaaaccggccttacactcctagcccacagaggcggaagctggagggcatcgtttttgacgttgacggtacattatgcgaaccacagacctatatgtttgccgagatgcgctccgccctcggcattcccaagtccagagatatcctcgaacacatctacagcctcccaaccgaggaagagcaacaccgcgcaatggagctgatccgcgacatcgagcggcgcgccatgttgcaccaggtggcacagcccgggcttaccgagctcatggcctacctggactcgcggggcattcgcaaggggatttgcacgcgcaacttcgaaacgcccgtcaagaatctgctgagcaagttcctttcggggaccgtctttgcgcctattgtgacgcgagatttttggccccccaaacccgacccggcggggatccttcatatcgcccgcagctgggggctgttgcggcggagtaccggcgaggccggggtgcccgccgatcctgccgcagaggaagagcgtcgagcggctgcggaggagggcgctcacgcccggggcgaagagaccgataatccggatctgctgcagacccaggtgggggaagaggtcgccgatgcgagtgggttgatcatggtgggtgacagcattgatgatatcacggcaggtcggagagcgggagccaagaccgttttgcttgtgaacgatgtcaaccgccatctagctgaccatgagcacaccgatctggcaataacacggctagatgagctgatcgatgtccttgaaaacggatcgctctaa

SEQ ID NO: 3839 - protein, 273 aa, Myceliophthora thermophilia
MPSASPTWKFAPLNRPYTPSPQRRKLEGIVFDVDGTLCEPQTYMFAEMRSALGIPKSRDILEHIYSLPTEEEQHRAMELIRDIERRAMLHQVAQPGLTELMAYLDSRGIRKGICTRNFETPVKNLLSKFLSGTVFAPIVTRDFWPPKPDPAGILHIARSWGLLRRSTGEAGVPADPAAEEERRAAAEEGAHARGEETDNPDLLQTQVGEEVADASGLIMVGDSIDDITAGRRAGAKTVLLVNDVNRHLADHEHTDLAITRLDELIDVLENGSL

SEQ ID NO: 3840 - DNA, 738 bp, Myceliophthora thermophilia
atggcaaccacatccgcccagccctcctcccaacctccaccaccgtcctcatcaggagaccccttcgacaccctcctcaccctcgaagaccaattctacaccgaggggtacaaccagggcatggccgacgggctggtcgccgggcgcaccgagggccggcagctcgggctggagcgggggttccaaaagttcgtcgaggccggccggatgcaggggcgcgccattgtgtgggcaaaccggctgaggctcgggcgcgggcacgggcgcgggcagggggcccaccacggggcggtcgggtctgcgaacccggccgaggaggcaggagcaggaggggcccaggcccgggacggcgcagccggggagggagacaggggaggggtgggaaggggaagcggtggtgggggggaccgagaggaggaggaaaagaagaataatggggaggggactgcccctcccccggcggcggagctctccctccccccgttaccggacaacccgcgcctgcggaagcacgtcacgacgctctatgcgctagcggagacggagagcttgtcgaccgagaacaccgacgaggcggtggatgactttgacgacaggttacggagggcacaggggcgcttcaaggtgatcgagcggatgacgggagagggggatagcgcgaagtccaaggggaccgacgggcacgggcacgatcctgggtcaagggcaggcaagggagaggggacgacggatatctga

SEQ ID NO: 3841 - protein, 245 aa, Myceliophthora thermophilia
MATTSAQPSSQPPPPSSSGDPFDTLLTLEDQFYTEGYNQGMADGLVAGRTEGRQLGLERGFQKFVEAGRMQGRAIVWANRLRLGRGHGRGQGAHHGAVGSANPAEEAGAGGAQARDGAAGEGDRGGVGRGSGGGGDREEEEKKNNGEGTAPPPAAELSLPPLPDNPRLRKHVTTLYALAETESLSTENTDEAVDDFDDRLRRAQGRFKVIERMTGEGDSAKSKGTDGHGHDPGSRAGKGEGTTDI

SEQ ID NO: 3842 - DNA, 1350 bp, Myceliophthora thermophilia
atgggccagacactctctgagcccgttgtcgaaaagacatcagctcatggcggggacgaacggctcttctacggcctgtcggccatgcagggctggcgcataagcatggaagacgcgcatacggccgtattgaacctgcttgaggataaccccaaggccgccaaagagcacccttcgaaactctccttcttcggcgtcttcgatggtcacggcggcagtaatgtcgctctcttcgccggcgacaacatccaccgcatcgttgcaaagcaagacactttcaaggcgggaaattacgaacaggccctgaaggacggcttcctggccacagaccgagccatcttgaacgatcccaaatacgaagaggaggtctcgggctgcactgcttgtgtgggcttgatcaccgatgacaagatctacattgcaaacgccggcgactcgaggagcgttttgggcgtcaaaggccgagccaaacctctgtcattcgaccacaagccccaaaatgaaggcgagaaggcacggatcacggctgcgggcggtttcgtcgacttcggacgcgtcaacggaaatctcgccctgtcgagagccattggagatttcgagttcaagaagagcgccgagctcgcaccagagcaacagatcgtcacagcctaccccgatgtcgtggtgcacgaaatttccgacgacgacgagttcctcgtgattgcttgcgatggtatctgggattgccagtcctctcaggccgtgatcgagttcgtcaggcgcgggattgctgctaagcaagacttggacaagatttgcgagaacatgatggataactgcctggcgtccaactcagagacaggcggtgtgggctgcgacaacatgaccatgatcatcattggcttcctcaaaggccggaccaaggaggaatggtacgaggagatagccagacgggttgccaatggtgatggcccttgtgctcctcccgaatatgccgagttcagggggccaggtgtgcaccacaacttcgacgagagcgacagcggttacgaccttgaggaccaaaagcagggcaagagctttggtatcggcggctataaggggcgcatcatcttcctgggggatggcaccgaggtcctgaccgattcggacgacacggagatgtttgacaattcggaggaggacaaagaccttgttagccaggtctccaaaggcacattgcaaggggggaatgcttcggaggcgaaggcggacaccccggcggatactggctcgtcatcatcgcagcagcagcagcagcaaccggagcagccgcaggcggagacaaaggcgcccgggaacaacagcgcggataaacagaagagtgggtag

SEQ ID NO: 3843 - protein, 449 aa, Myceliophthora thermophilia
MGQTLSEPVVEKTSAHGGDERLFYGLSAMQGWRISMEDAHTAVLNLLEDNPKAAKEHPSKLSFFGVFDGHGGSNVALFAGDNIHRIVAKQDTFKAGNYEQALKDGFLATDRAILNDPKYEEEVSGCTACVGLITDDKIYIANAGDSRSVLGVKGRAKPLSFDHKPQNEGEKARITAAGGFVDFGRVNGNLALSRAIGDFEFKKSAELAPEQQIVTAYPDVVVHEISDDDEFLVIACDGIWDCQSSQAVIEFVRRGIAAKQDLDKICENMMDNCLASNSETGGVGCDNMTMIIIGFLKGRTKEEWYEEIARRVANGDGPCAPPEYAEFRGPGVHHNFDESDSGYDLEDQKQGKSFGIGGYKGRIIFLGDGTEVLTDSDDTEMFDNSEEDKDLVSQVSKGTLQGGNASEAKADTPADTGSSSSQQQQQQPEQPQAETKAPGNNSADKQKSG

SEQ ID NO: 3844 - DNA, 795 bp, Myceliophthora thermophilia
atggccgccaccgacgcgcaatttcccctgccaaaagtgctcacctaccccgcgtcgaccccgccattactggttacgcaaggcgcggaagggcgcctctacaaaaccacacacctcctgtctgaccggccgtgcgcactcaagtaccgcccgccgaagccataccggcacccgatcctcgactcccggttgaccaaggcgcgcatctcgtccgaggccaaggtgctcgagagatgctggcgcgagggcgtgcctgtccctgccgtctacgccatggaccccgcggcgggctggatgatgatggagtggattgacgggatcccggtgcgcgtgggaatcaacaagttgctgggtccaaggccggaggaagaggccctgcccgagacacacgaggcactccttgccgacttgatgaagaggatcggggctgcgatcggcgccctgcacaagacaggagtagtgcacggggatctgacgacgagcaacatgatgcttaggccaaggaaaagcggccaggccggcggaagcactgggaacgaggacgagggagaggcgctcaatggggacgtgttcatcatcgactttgggctggcgacgcagagcatgtcggacgaggatcgtgccgtggatctttacgtccttgagagggcgtttgcgagcacacatccaagggccgagaaattgttcgccgcggtgcttgaggcgtacaaggaaacctttaagaaggcatcctccgttctgataaagctagaggacgtcaggatgcgtgggcgcaagaggagcatgctgggatag

SEQ ID NO: 3845 - protein, 264 aa, Myceliophthora thermophilia
MAATDAQFPLPKVLTYPASTPPLLVTQGAEGRLYKTTHLLSDRPCALKYRPPKPYRHPILDSRLTKARISSEAKVLERCWREGVPVPAVYAMDPAAGWMMMEWIDGIPVRVGINKLLGPRPEEEALPETHEALLADLMKRIGAAIGALHKTGVVHGDLTTSNMMLRPRKSGQAGGSTGNEDEGEALNGDVFIIDFGLATQSMSDEDRAVDLYVLERAFASTHPRAEKLFAAVLEAYKETFKKASSVLIKLEDVRMRGRKRSMLG

SEQ ID NO: 3846 - DNA, 837 bp, Myceliophthora thermophilia
atgtccggcatcgttcacaagattaaggaggctgtccaccccgacagcaagtcccaccacaacacagcccctgagggcagccacggtccccacaacagccgtgtagctaacgccgtcgaccctcgtgtcgactcggatcgcgacggccgcggggctggccgcaccgccggccacggggagtacggcagtgctggctacggtaccggtcgcgccggctacggcactggcaccgccgaaggaacacatggtccgcacaacagccgcgtagccaacgccgctgatccccgtgtcgactcggatctcgacaactcgcgcactatcggcaccggtcgaacggccggcaccggcgccactggcttcggcgctggcaccactggcggttacggttcgggtatcactggcggcgccggctccggcgctaccggtgtgaccggcacccacggtgccccggcaggtacctacggcccgcacagcagccgcgtggctaacgctgctgaccctcgcgtcgactcggaccgtgacggccgcggcgccctcggcaccggccctggccctgcccccaacactgccggccctcacagcagcgacatggccaacaagatggatccccgcgtcgactcggatcttgacggcagccgaactatgggtgggaacaagacgtaccaatctggaacaatgtcggatgcgcgacgcgatcccaccgacgctgcccaagtgcctccttcagtcctgaggaagcatctcggcgaaccgtcgatcgaacacgaggatgtcacccaccaccgtgagaggagaaacagtatcaagacacaccaggaaaccttccgcggtatctaa

SEQ ID NO: 3847 - protein, 278 aa, Myceliophthora thermophilia
MSGIVHKIKEAVHPDSKSHHNTAPEGSHGPHNSRVANAVDPRVDSDRDGRGAGRTAGHGEYGSAGYGTGRAGYGTGTAEGTHGPHNSRVANAADPRVDSDLDNSRTIGTGRTAGTGATGFGAGTTGGYGSGITGGAGSGATGVTGTHGAPAGTYGPHSSRVANAADPRVDSDRDGRGALGTGPGPAPNTAGPHSSDMANKMDPRVDSDLDGSRTMGGNKTYQSGTMSDARRDPTDAAQVPPSVLRKHLGEPSIEHEDVTHHRERRNSIKTHQETFRGI

SEQ ID NO: 3848 - DNA, 1884 bp, Myceliophthora thermophilia
atggacttcaacgggttgaagcgcaaggacacaacaaaagggccgcctctgcgcatcctgtcgcttgatggaggaggcgtgcgcggctactccatgtttctaatcctccaggagctcatgcaccgaacgtttgtcgaaatcgaaggccgggcaccgcgacgatccgagatccccaaaccatgcgaccacttcgacctcattgtcggcaccggtactggcggcctaattgccctcatgctgggccggttgcgcctcgatatcgaaacatgcaaggagttatacgtccgcctcacccgcatggtcttcgaaaccgacaagaccatcgccggcatcccctaccgatcgaccctgttcaaggcgacaaagctggaggaggcgatcaaggagtgtgtccgggagcacaccgtctacgaaaaggagggaaatgatggctccgatgtggggagcacatatgattcgctgagcccggtctcccgctcgagcgcagcataccctaggcggcacgccagcaacgccagcgtcttgagcttcagcgcgcggagccccagcgcgcaggccgcgagaccggtgttttcccgcaatggcaacccaaatgctcgcctgtatgacgagcgggaaaatcgaaccaagactgccgtgacggccgtttacaagggcaccccgaaaggtggggcaccggccatgctccgctcttacgattccaggcgggagccggcccccgagttcgactgtaagatctgggaagccggacgtgcgacttgcgccatcggcctcgcgttcaagcccatccagattgggcagtccgtgtttcacgacgatggtgcgggcacgtttaacccgtccataacagcactcgacgaggcggtcgtcaacgagtggccgggccgggaggttggcgtcttcgtcagcgtgggcaccgggaagcgaccaaggggtagcgacgcaaattcggcgctgtggtacgagggctttctcggcgagtttgccgaggcgcggaggaagctgatcgcaaagattgagggttgcgagaagatccacgagcagatgaagagggaacacctgtcgaagcggggcgtcaacatcgagaactactaccgctggaatgtcgaggtcggtgtcggcgagtttggcatgaatgagtggaaccggctggcggacatcagcacgaataccaggaggtatctggctagggaggaagagcagaagatggtccagagcgcgtcggcaaagttggccaagatccacttcgcaaagcagcgctgggagcgcctcagccaggccagcccggaggcggcgcaaaaagtcccccagatctcgctgcccctggcggcggagctgccgggagacattccccccgtgcccgctcgcgccccaaccccagcctcgccaagccgacagtcgtacgactcgggccacgatatattgccagtgcggggatctacgccttctccgaggagctcttgcgagccgccacgacaatcaccccagccgaaccagctgccgtatccgcccgcgcccccctctggcggccacccgccagcagcaccgagccactttgcggacggcgcggccgaggactcggaccgcctagtggtcagtgccccgacgccggcgcaataccggatcgccacgggcgcggataagatcgcgatcgcggggccggacgactaccccaggcgatacgatgatccgctgatgcagcccgcgccgttgcgggtgcggccgccgtcggtaccacccccgctacccccaaaaacaccgctcccggagatccaggctggccatggccgagcgtctgcccctgtgttgccttatcctctcgacgaggacgcaccgccggcggtcaatatggcgagaaagccatactactacagctcgaattag

SEQ ID NO: 3849 - protein, 627 aa, Myceliophthora thermophilia
MDFNGLKRKDTTKGPPLRILSLDGGGVRGYSMFLILQELMHRTFVEIEGRAPRRSEIPKPCDHFDLIVGTGTGGLIALMLGRLRLDIETCKELYVRLTRMVFETDKTIAGIPYRSTLFKATKLEEAIKECVREHTVYEKEGNDGSDVGSTYDSLSPVSRSSAAYPRRHASNASVLSFSARSPSAQAARPVFSRNGNPNARLYDERENRTKTAVTAVYKGTPKGGAPAMLRSYDSRREPAPEFDCKIWEAGRATCAIGLAFKPIQIGQSVFHDDGAGTFNPSITALDEAVVNEWPGREVGVFVSVGTGKRPRGSDANSALWYEGFLGEFAEARRKLIAKIEGCEKIHEQMKREHLSKRGVNIENYYRWNVEVGVGEFGMNEWNRLADISTNTRRYLAREEEQKMVQSASAKLAKIHFAKQRWERLSQASPEAAQKVPQISLPLAAELPGDIPPVPARAPTPASPSRQSYDSGHDILPVRGSTPSPRSSCEPPRQSPQPNQLPYPPAPPSGGHPPAAPSHFADGAAEDSDRLVVSAPTPAQYRIATGADKIAIAGPDDYPRRYDDPLMQPAPLRVRPPSVPPPLPPKTPLPEIQAGHGRASAPVLPYPLDEDAPPAVNMARKPYYYSSN

SEQ ID NO: 3850 - DNA, 1977 bp, Myceliophthora thermophilia
atggatgccgttctgcggaacttcaagttgattccctgccccacaggggacagctgcaccaaggccaactgcccgtggcaacaccctcgggaccaaagcactccaacgaaacaagcagatggtggtagccaggatgaagacgggccacgaaaacgtcgaaaggtctcttccgagcctgcgtctaccccggatcagcctactccggcgaagcctcagccttccacagccaaaggcccggtttcgccgccacccttgaagcgaaaacagcccgagctgccaggccaaccagctgcgggtgcaacaccaaccaagccatcaccaaactcggtcccatctccctcgactagtaaaggccctgaacagggtgccacgccccgaaaggttacaccgcaacaggccacgccacaaaaggtcgaacctaggaagcctgaatcactcaatccccgacacctaaagacagctgcgccagctccccacgactttcgatataaagctctcaagcttcttcacgagcaattccaacgcctcaacaacgagctgaagaaagacgccaaggaagatgagcagcagctggttttgtcggcccaagaactcatctggttagcattggacgaggagcagaaaatggcgacggagaagccgtctatctaccagaacgttatcaaaaaccgcatcatgacctacaagaggatgaccgtcggccagtggagggacgagcgcgttgccgagcgcaagaagaaagaagccgcagcaacaccggggtcgaacacaccaagaaaaccggtcctgggaccgcccaaggtcataaacacaggcctcacgcccgagcaggaagtcaagttccttgtctacttgcaaacgccgattgataagctcgcccagtggggctatgttccgtcagcccctaccgaggaggagattagcaaggcgcgcgaaggggaagaggcgtcgttgggttacgaagtgtgcgaccgctgcaggacgcgcttccaagtgtttcccggtcgccgcgaggaggatggggctctcacatcgggcggcaaatgcgtccatcacccgggcaaggcgtactaccccgaacggagcctcggcgacacggagaaaccgtccagacggtaccggtgctgtcagcaagtggtgggtgagtcagcaggctgcgtgagcagcaacacgcacgtcttcaagacgacgtcgccggcgcgcctggcgtctatcatcccgttcgccgagaccccgccgaatccgctcgcgccaaaggaccgcgccgtctgcttcgactgcgaaatgggctacacggtgcgcgggatggagttgatccgactgacggccacgagctggccggacggaaaggagctcttggacgtcctggtgcggccggtgggcgagattttggacctcaactcgcggtattctggtgtgtggccggaggacattgtcaatgccgagccgtggtcgggtgaggaggatgtaaacagtggaccccaggaggaggaggatgagggcggagacgggagggcgcccgaagggggcaagcccagggcgcggaagaagatgcgaatcgtcccatcgcccgtcgtggctcgcaacctgctcttctcgctcatctcgcccgacacgccactgattgggcacggcttggaaaacgatctcaacgcagtccgaatcatccatcctaccctcatcgacaccatcctgttgtttcctcaccgccgcggcctaccgatgcggtacggtctcaaaatgctcatggagacgcagctcaacaaggcaatccaagtggaaatcgagggcgaagagatggggcatgacagtgccgaggatgcccgggctgcgggcgagctagtacggctcaaggtccaggagaagtggaacgccatgaagggcgagggatggcgcttggtgaacggggagtttgtgccgcccgggggaaggaaggatggggagggcaagctgagcgaggcgtttcttgaaagctag

SEQ ID NO: 3851 - protein, 658 aa, Myceliophthora thermophilia
MDAVLRNFKLIPCPTGDSCTKANCPWQHPRDQSTPTKQADGGSQDEDGPRKRRKVSSEPASTPDQPTPAKPQPSTAKGPVSPPPLKRKQPELPGQPAAGATPTKPSPNSVPSPSTSKGPEQGATPRKVTPQQATPQKVEPRKPESLNPRHLKTAAPAPHDFRYKALKLLHEQFQRLNNELKKDAKEDEQQLVLSAQELIWLALDEEQKMATEKPSIYQNVIKNRIMTYKRMTVGQWRDERVAERKKKEAAATPGSNTPRKPVLGPPKVINTGLTPEQEVKFLVYLQTPIDKLAQWGYVPSAPTEEEISKAREGEEASLGYEVCDRCRTRFQVFPGRREEDGALTSGGKCVHHPGKAYYPERSLGDTEKPSRRYRCCQQVVGESAGCVSSNTHVFKTTSPARLASIIPFAETPPNPLAPKDRAVCFDCEMGYTVRGMELIRLTATSWPDGKELLDVLVRPVGEILDLNSRYSGVWPEDIVNAEPWSGEEDVNSGPQEEEDEGGDGRAPEGGKPRARKKMRIVPSPVVARNLLFSLISPDTPLIGHGLENDLNAVRIIHPTLIDTILLFPHRRGLPMRYGLKMLMETQLNKAIQVEIEGEEMGHDSAEDARAAGELVRLKVQEKWNAMKGEGWRLVNGEFVPPGGRKDGEGKLSEAFLES

SEQ ID NO: 3852 - DNA, 423 bp, Myceliophthora thermophilia
atgcatccagaaccctcagaccctgttttcgctggcgtggcagagtcccggtccaaggtaagccccggcatcatccccagatcacttgttaatccccccggtgctagtgtcgcaagcggagtacggacacgggaagagagggaaggagaatcagatgagcgagtcggcaatccacccttgtgcgtcgcctcggtctactcggctcgagcctttagcatcgggccccggaccgctcctggaccggcagcgaaggttggcactgcagagttgcccctttcacaagggcctcccgccttctctaatcccttttcccgactccgcgcccgaatcctccccttcccccattctcccttcccatcaccccccggtcgcgtggaacgctcgggaaggaaggaaggtgggaggaaggcgaggggattttag

SEQ ID NO: 3853 - protein, 140 aa, Myceliophthora thermophilia
MHPEPSDPVFAGVAESRSKVSPGIIPRSLVNPPGASVASGVRTREEREGESDERVGNPPLCVASVYSARAFSIGPRTAPGPAAKVGTAELPLSQGPPAFSNPFSRLRARILPFPHSPFPSPPGRVERSGRKEGGRKARGF

SEQ ID NO: 3854 - DNA, 648 bp, Myceliophthora thermophilia
atgtgtgtggtcgctccagcactccccggtggcgaggcagcactgtgcttcgagcatcctcagactagctccgtcgaacctcgaggtgcttgggcggtctccgtcctctcaacctgtctgtccaacttgtcacatctgtctgtgactttgggtaagacatgccgactcgataggctgaaaggacagtaccgggcaccacgaaaaggtgcatcttgcggccgcgatgttacttcccctagcagctttgccaacgcaactgaccacatcacggacacaacacgaggtcctgtgggaaacggcaaaaatccggaaccaacagaggacgcagtatcaaggaaatgccacttccgtcgtgaccatgattactgttttaaaggtagatattccgtagaatttcccggctcggaccgaggtcaatggcatcgagaagccgctcacctgaccgaccgtgtcggctgccttcggaatgccttcttgtctgacattggtccaagtcgcccggccaagtcagaaccaattggacgtcttcccggcttgcgccgggagtggcacccgggccaagacttgattgattccgaaaaaatccagacacgtccatttccgtcagtcgggcacatggagctgaacgcttccggcgcccgagcgtga

SEQ ID NO: 3855 - protein, 215 aa, Myceliophthora thermophilia
MCVVAPALPGGEAALCFEHPQTSSVEPRGAWAVSVLSTCLSNLSHLSVTLGKTCRLDRLKGQYRAPRKGASCGRDVTSPSSFANATDHITDTTRGPVGNGKNPEPTEDAVSRKCHFRRDHDYCFKGRYSVEFPGSDRGQWHREAAHLTDRVGCLRNAFLSDIGPSRPAKSEPIGRLPGLRREWHPGQDLIDSEKIQTRPFPSVGHMELNASGARA

SEQ ID NO: 3856 - DNA, 534 bp, Myceliophthora thermophilia
atgcaggactacagctctcagggtcggccctgcttcacctgcggccaaactactcaccaggctcgtgactgcccaaacaagggtgcggctaagtgctacaactgcggtggtgagggtcacataagccgtgaatgtcccgagggccccaaggataccaagacttgctaccgctgcggccagcccggccacatctcccgcgagtgccagagcggcggtggcggaggccaggccggcgctgaatgctacaagtgcggtgagatcggccacattgctcgcaactgcagcaagggcggtccctcgtacggcggcggttacggcggcggctatggcggcggctatggccagaagacctgctactcgtgcggcggcatcggccatctctcgcgcgactgcgtgaacggcaacaagtgctacaactgcggcgtttctggccacctgtcgcgcgactgccccaaggagtcgacaggcggtgagaagatctgctacaagtgccagcagcccggtcacgttcagtctcagtgccccaacaactaa

SEQ ID NO: 3857 - protein, 177 aa, Myceliophthora thermophilia
MQDYSSQGRPCFTCGQTTHQARDCPNKGAAKCYNCGGEGHISRECPEGPKDTKTCYRCGQPGHISRECQSGGGGGQAGAECYKCGEIGHIARNCSKGGPSYGGGYGGGYGGGYGQKTCYSCGGIGHLSRDCVNGNKCYNCGVSGHLSRDCPKESTGGEKICYKCQQPGHVQSQCPNN

SEQ ID NO: 3858 - DNA, 1641 bp, Myceliophthora thermophilia
atgctgttgcttccggtatgcctcagtgcagacgagccatgccgaccaccgggcctcaagattcgcgagtctaataagttggttttcatcgatgagtcgcatgctgccaccaacgatgcctcgagtccagatagcgaaccagacgagtccgagacagtatgggactcctcacccgtggcttcgggatcctcgtcccagaaaagtccgcctgtatcagcaggcatgacgcagtatcgacccgcgtcgcccccagagcgcttgcgacggatgatgatttcttccgtcgttaacccccctgccccgaattggccgctcacagatcccgaagaggcccgcctcttccgtcactttgtcgagaagctagccatctgggtggctgacactagtctccgcagctcgatttgtgtgatccgcatcgtacgtattgaccccggtgtggctccgactgcggctttcacttgcccatgccaaagcggagaagagactaatgatgatctagataccttcgagatcatggtccctcagatggcaaaagacttccctgtattgctgaacgccatcttcgccctctcggcacgccacttgggacaaacgctcagcgacggcagtctcaggaagaaatacaaccggctggcggacacgcacaacgaggcctgcatcaacatcatgaagggtctcttgatgagcaaggattatcagtccgtctggaccgaacacctctttgcggcaaccatcatccttcaggtcatggaggaaatgaatgccgggctgagagacgaggacgatgacaacggtgtccacgggcatcaggaggctatcgggaggggccacttgccagggatgtacaggttcgttcgggagcgctctttcgagcccggaacccttggcgcagcgtccttctgggttgggctgcgacaggaaatatacagcgccgtgacaaagaggcagccagtgtgcctgaatcttgtccatcctggcctcgtcaataggtctctcgaccagacggatgattacacttgggctaacttggctgtgatgcactgtgccgacgttgtcaacttctgcttcgataccgacaagcatcgtcgacagtcctgggacgaactcgagagatggaatcgtcgctggtttgaagaacagccgccgtcatacgaccctgtcttcaagggttcacggggttcagctgtttttccagaaatctggtatcatcggagctgtcaaggcaagttcacctgccgtcatctcatctccgcttgtgcgctaaccttcggtccgtttgtcgaaacagtgattggcgtgcagcaccacaggcttgcaagactcttcttgctggaccaccgtgttaaatccggcgcactggaaagcatccgggcaacggtccgggagatttgcggcatcgggcgcggtaatagtttcaccccgccaggcctgttcacatcgtgcatggcgatcgcggcctttggtcactacttcaacaaggttgaagagcaagatgcaatgatctcgatcctggaagaaacgcaaaaagaccatgcccggccaaccgagagcgtcagactcgacatgctccaggcttgggggcgcaatactggcttgtccgggaggccggctaaggcgccgaacaccaagcgcatcgcctga

SEQ ID NO: 3859 - protein, 546 aa, Myceliophthora thermophilia
MLLLPVCLSADEPCRPPGLKIRESNKLVFIDESHAATNDASSPDSEPDESETVWDSSPVASGSSSQKSPPVSAGMTQYRPASPPERLRRMMISSVVNPPAPNWPLTDPEEARLFRHFVEKLAIWVADTSLRSSICVIRIVRIDPGVAPTAAFTCPCQSGEETNDDLDTFEIMVPQMAKDFPVLLNAIFALSARHLGQTLSDGSLRKKYNRLADTHNEACINIMKGLLMSKDYQSVWTEHLFAATIILQVMEEMNAGLRDEDDDNGVHGHQEAIGRGHLPGMYRFVRERSFEPGTLGAASFWVGLRQEIYSAVTKRQPVCLNLVHPGLVNRSLDQTDDYTWANLAVMHCADVVNFCFDTDKHRRQSWDELERWNRRWFEEQPPSYDPVFKGSRGSAVFPEIWYHRSCQGKFTCRHLISACALTFGPFVETVIGVQHHRLARLFLLDHRVKSGALESIRATVREICGIGRGNSFTPPGLFTSCMAIAAFGHYFNKVEEQDAMISILEETQKDHARPTESVRLDMLQAWGRNTGLSGRPAKAPNTKRIA

SEQ ID NO: 3860 - DNA, 993 bp, Myceliophthora thermophilia
atggctcactccgaatcctcgtctggctccgagagcccggcgcccgtggtcaatggcgacaagagcaggcgaagcaagagcaagaacaacaacaacaacaacggcaagaagcggtcgcgagagggagaccccaaggatgctgccagtgacgccgatgctaacggtgcgcatccgctcggagagcgccgctcgagcgtcagcaaacctgcgcgggacttccgggacaagccggagccgccgcccaagaagaagaagagaaagacgccggcaccggccgcccccgcccccgccgtaaaggaaacgccgacggccgaggaagccgccgaacaatcgacccggtctccgagccccgtcatcgatttcgacggcctgagccggcccagcgtcgggacgcggaagcgcgtagatgaggacgacgagcagaaacaagcccggctggagcgcatgaagggtgccgtccggacgctcctcgagtgcgtcggcgaggaccccgaccgcgaaggcctgctcgccacgcccgaccgctacgccaaggccatgctgtactttaccaagggctaccaggaaaacgtgcgcgacattgtcaacggcgccatcttccaggagggccacaacgagatggtcattgtcaaggacattgaggtcttcagcatgtgcgagcaccacctggttcccttcaccggcaagatgcacatcggctacataccctccaacgccgtcatcggcatctccaagctgccgcgcattgccgagatgtttgcccgccgactccaggtccaggagcgcctgaccaaggaggtggccaacgccgtcatggaggttctcaagccccagggcgtcgccgtcgtcatggagtcgagccacctgtgcatggtcatgcgcggcgtccataagaccaccagcaccaccatcaccagctgcgtcctgggctgctttgagcgaaaggaaaagaccaggaacgagtttctgagcttgatcggcgtcaaccgctga

SEQ ID NO: 3861 - protein, 330 aa, Myceliophthora thermophilia
MAHSESSSGSESPAPVVNGDKSRRSKSKNNNNNNGKKRSREGDPKDAASDADANGAHPLGERRSSVSKPARDFRDKPEPPPKKKKRKTPAPAAPAPAVKETPTAEEAAEQSTRSPSPVIDFDGLSRPSVGTRKRVDEDDEQKQARLERMKGAVRTLLECVGEDPDREGLLATPDRYAKAMLYFTKGYQENVRDIVNGAIFQEGHNEMVIVKDIEVFSMCEHHLVPFTGKMHIGYIPSNAVIGISKLPRIAEMFARRLQVQERLTKEVANAVMEVLKPQGVAVVMESSHLCMVMRGVHKTTSTTITSCVLGCFERKEKTRNEFLSLIGVNR

SEQ ID NO: 3862 - DNA, 312 bp, Myceliophthora thermophilia
atggaggaagcgcaactgagcgatcccacctcgtgggagctaacagcactcgattggtgcagcagaccgctggcccgggcgctctgcgacggattcgtccactactgcagaccggaggcgcttcaccaggccttcgttgctggcactttctccacttatcgactttccaagtctcatatcaatcgccgtgaaagagggcacctcgagagcaccggcgccaagccaacccagcgccgccgcatgcttgcggcgagctcggcctgcgagtgccccacggaatttcaacgctgtcggcgtgccaagcaacgataa

SEQ ID NO: 3863 - protein, 103 aa, Myceliophthora thermophilia
MEEAQLSDPTSWELTALDWCSRPLARALCDGFVHYCRPEALHQAFVAGTFSTYRLSKSHINRRERGHLESTGAKPTQRRRMLAASSACECPTEFQRCRRAKQR

SEQ ID NO: 3864 - DNA, 783 bp, Myceliophthora thermophilia
atgcccgaccccttcagggttctcgtcttcagccggacgacggcatacaggcacgattcgatcccagccggcatccgggctctgcaccgtctcgcgtccgcttcggctgccgggcggcacccttttacggtggacgacagcgaggatcccgccgtgttcagccccggctccctctcggcgtatcgcgtcatcgtcctcctgcagtgctcgggcgagttcctggacggcgcgcagctgggcgccctgcggggtttcgtccaggcgggcggcgggatcgtggcggtacactgcgccagcttcgccatgcagtcatccgaatggtacggccacctcattggcgccgtgttcgacaaccacccggaaccccaggtcgggctcgtcaagctgctcgacccgaaacacccagtcatgtcgctgcgggcgtgtgaccaagacggcggcgccgaccggccagcgcaggaaccgcaggaaccgcaggaacccaagcaggcgcagctggagcgcgtctggaaggacgaatggtacaacttcaaggcgcacccgcgggcgacgtccgacggcctgcacgtgctccttggcgtggatgagaagtcctacgagggcggggcgcacggggaggaccacccgatcgcatggtgccagacttttgacggaggtcgttgcttctatactgctcttggacactttgacgaggcttacgaggacgactggttcgtggggcaactacacgctgggatactctggacggctggtctcgctgaagacccgagtggagggaattga

SEQ ID NO: 3865 - protein, 260 aa, Myceliophthora thermophilia
MPDPFRVLVFSRTTAYRHDSIPAGIRALHRLASASAAGRHPFTVDDSEDPAVFSPGSLSAYRVIVLLQCSGEFLDGAQLGALRGFVQAGGGIVAVHCASFAMQSSEWYGHLIGAVFDNHPEPQVGLVKLLDPKHPVMSLRACDQDGGADRPAQEPQEPQEPKQAQLERVWKDEWYNFKAHPRATSDGLHVLLGVDEKSYEGGAHGEDHPIAWCQTFDGGRCFYTALGHFDEAYEDDWFVGQLHAGILWTAGLAEDPSGGN

SEQ ID NO: 3866 - DNA, 933 bp, Myceliophthora thermophilia
atggggcagagaaacctgttactctgtttcgacgcctttgggaccctcttccacccgaagggtcctgtcatggagcaatacgtcgcggtcgcgcaacaatgcggccttggtggtttcagcgcccaagacgtcgaggcgtcgttcaaagctgccttctctcgccagtcaaagctgcatcccaattacggcagggccagcggcatgggcgcattaaagtggtggaccaatgtcatcacccagacgttccagccgctcattgggaaagggacggagctgcccaatgaccttgctcccaagctctggcacaggttcagctccggggagggatacagcctctcgcccggcgtggcatccctcctccggtcactcaggcagcggcagcaagaacggaggcccaagtcctctcggctcatcgtcggcgtcatcaccaactctgacgacagagtcccgagcatcctttcctccctgggtctccacgtcagtcccttgcgcttcggagccccgttgaactcggccagaggagggccgtctgagcactatgacgtcgacttgcactgcatgtcctacgacgtcggagttacgaaaccggacaggcgcatctttgacgccgccgaggagatggccgtccagcttgtcatggcacaggaagctgccgagcatggccgggacgtcgagcgggcgcagcctgcattaccctggctgaaactctatgttggtgatgagtatgagaaagatgtggtcggagcacgcggtgcggggtggaatccgatctttgttggcgccaaagaagaagtgtccggtcaggacagtgtactcgacttggatcagctgcggaacaagaggctcgacgaagtgtttcaccgagatggtcccccattgacgatacacgcagacagcacccaggaggtgcttgagtggctaatagagtactaa

SEQ ID NO: 3867 - protein, 310 aa, Myceliophthora thermophilia
MGQRNLLLCFDAFGTLFHPKGPVMEQYVAVAQQCGLGGFSAQDVEASFKAAFSRQSKLHPNYGRASGMGALKWWTNVITQTFQPLIGKGTELPNDLAPKLWHRFSSGEGYSLSPGVASLLRSLRQRQQERRPKSSRLIVGVITNSDDRVPSILSSLGLHVSPLRFGAPLNSARGGPSEHYDVDLHCMSYDVGVTKPDRRIFDAAEEMAVQLVMAQEAAEHGRDVERAQPALPWLKLYVGDEYEKDVVGARGAGWNPIFVGAKEEVSGQDSVLDLDQLRNKRLDEVFHRDGPPLTIHADSTQEVLEWLIEY

SEQ ID NO: 3868 - DNA, 1314 bp, Myceliophthora thermophilia
atggcgtcggccatcttcttcctcgaccttaagggcaagacgcttcttgcccgcaactacaggggagacatccccatgtcagcggtcgagaagttcccaatactcctcagtgaagccgaagaagagtcctcagcagtacctccttgcttctcccacgaaggcatcaattacctgtacatccgccacaacaacctgtacctcctcgctctcacaaaacgaaacaccaatgccgccgaaatcctcctcttcctccacaagatcgtcgaggtctttaccgagtacttcaaggtgctcgaggaggaatccatccgagacaactttgtcatcatttacgagctcctcgacgaaatgatggacttggctacccgcaaacgaccgaagtcgcacaagcttgagatccaagcccggccgcccattgccgtgaccaacgccgtctcgtggcgctctgaaggcatacggtaccgcaagaatgaagtctttctcgacgttatcgagtcgctcaatctgctcgtgtcggccaacggcaacgtgctgcggtcggaaatcctgggtgccatcaagatgaagtgctatctgtcaggcatgcccgagctgcgcttgggcctcaacgacaaggtcatgtttgagacgacgggccggacgacccgcggcaaggccatcgaaatggaagacgtcaagttccaccagtgcgttcgcctgtcgcgctttgagaacgatcgcaccatcagcttcatcccgcccgatggcgagttcgagctcatgtcgtatcgcctcaacacccaagttaagccgctcatctgggttgagtgcgtggtcgaatcgcacagcgggtcccgcattgaatacatgctcaaggcgcgagcccagttcaagcgccgcagcaccgccaacaacgtcgagatcatcgtccctgttcccgacgacgcggattctccgcgtttccgcacaaatgtcgggtcggtgcactacgctcccgagaaaagcgcgatcgtgtggaagatcaagcagttcggaggtggcaaggagttcctcatgcgtgcggagctgggtcttcccagcgtccggggtgatgacgagcatggtggcggcatgactggcgggtttggaggaagcatgggtggcattggtgggcccggaaagggagctaagaggccgattcaggtcaagtttgagatcccatactttacgaccagcgggatccaggtacggtatctgaagatcacggagccaaagcttcaatacccttcactaccatgggtgcgatacatcacgcagtccggtgacattgccgtccgactgcccgatgcagtatga

SEQ ID NO: 3869 - protein, 437 aa, Myceliophthora thermophilia
MASAIFFLDLKGKTLLARNYRGDIPMSAVEKFPILLSEAEEESSAVPPCFSHEGINYLYIRHNNLYLLALTKRNTNAAEILLFLHKIVEVFTEYFKVLEEESIRDNFVIIYELLDEMMDLATRKRPKSHKLEIQARPPIAVTNAVSWRSEGIRYRKNEVFLDVIESLNLLVSANGNVLRSEILGAIKMKCYLSGMPELRLGLNDKVMFETTGRTTRGKAIEMEDVKFHQCVRLSRFENDRTISFIPPDGEFELMSYRLNTQVKPLIWVECVVESHSGSRIEYMLKARAQFKRRSTANNVEIIVPVPDDADSPRFRTNVGSVHYAPEKSAIVWKIKQFGGGKEFLMRAELGLPSVRGDDEHGGGMTGGFGGSMGGIGGPGKGAKRPIQVKFEIPYFTTSGIQVRYLKITEPKLQYPSLPWVRYITQSGDIAVRLPDAV

SEQ ID NO: 3870 - DNA, 918 bp, Myceliophthora thermophilia
atgctctctgagtcagagtttcccgtcgaagtcattctcgaggcgatcgacaacatggtacagcccaaggagacccggccgaaggtcatcctctttgacatcggcggtgtctgtgttgtctcgcctttccagtcgatcctcgactacgagctcagcctgggcatccctccgggttggatcaactactccatctcgcgcactgcaccgtcgggcttctggcaccggctcgagacgggcagcatccccatggacgccgccttctttgaggggttcaaccgcgacctgcacgaccaggcccggtgggagaccttctaccgcgcccagcaggcccgcaacccgtccctgcccaaggagatcccacccctccccaagatcgacggcgagtggctctttttcgacatgatggcggcagcgcgctccccggacccctggatgtacccagccctcaaggccctcaaggccagtggcaagtacattgtggccgcgctcagcaacaccgtcattttcccgccggagcacgagtactcgcgggtcgacttcttcgacgaccccatccgcagccaatttgacgtctttgtgtcatcagcgcatgtgggcatgaggaagccggacccgcggatctaccagctcactctgcagagggtgaacgagtttgccaaggccaatgccgacacggagagggggcgggccttgggctggtcggaaggggtgaaggcggaggagattgtgtttctggatgacattggggagaacctcaaagcggccaaggctgccgggtttagaaccatcaaagtaccgctcgggcgggcgtacgaggcggtggaagagctagagaaggtgacaggattggttctggcgggtgaccaccccaaggtgcctatcaagcctaactacaaagggagcaaggcgaagatttga

SEQ ID NO: 3871 - protein, 305 aa, Myceliophthora thermophilia
MLSESEFPVEVILEAIDNMVQPKETRPKVILFDIGGVCVVSPFQSILDYELSLGIPPGWINYSISRTAPSGFWHRLETGSIPMDAAFFEGFNRDLHDQARWETFYRAQQARNPSLPKEIPPLPKIDGEWLFFDMMAAARSPDPWMYPALKALKASGKYIVAALSNTVIFPPEHEYSRVDFFDDPIRSQFDVFVSSAHVGMRKPDPRIYQLTLQRVNEFAKANADTERGRALGWSEGVKAEEIVFLDDIGENLKAAKAAGFRTIKVPLGRAYEAVEELEKVTGLVLAGDHPKVPIKPNYKGSKAKI

SEQ ID NO: 3872 - DNA, 474 bp, Myceliophthora thermophilia
atgtcgctatgccaaaatcgtctgcaggaggagcgcaagcagtggcgcaaggaccatccgtttggcttctatgcgcgaccgcagaagaatgcccagggcgtgcttgacctcaaggtctgggagtgtggtatcccgggcaaagagaagaccatgtgggaaggcggcctgttcaagctggtggtgacatttcccgacgagtatcccacgaaaccccccaagtgcaagtttacgccgcctctcttccaccccaacgtctacccatccggcaccgtctgtttgtcgattctgaacgaagaagaggcgtggaagcccgcgattaccatcaagcagatcctgcttggcgtccaggacctcctcaacgaccccaacccagaatctcccgctcaggccgaggcatacaacatgtacaagaaagacagagtgcagtacgagaggcgcatcaggcagattgtgcgggagaatgccgcgccatga

SEQ ID NO: 3873 - protein, 157 aa, Myceliophthora thermophilia
MSLCQNRLQEERKQWRKDHPFGFYARPQKNAQGVLDLKVWECGIPGKEKTMWEGGLFKLVVTFPDEYPTKPPKCKFTPPLFHPNVYPSGTVCLSILNEEEAWKPAITIKQILLGVQDLLNDPNPESPAQAEAYNMYKKDRVQYERRIRQIVRENAAP

SEQ ID NO: 3874 - DNA, 624 bp, Myceliophthora thermophilia
atggacttgggggcagcttactgcagtaagcctcttgagagacaaatcgagactcgcaacctcagcttctcagagatgcattgcgttcctcacctccagagggccagctcctcacgtggtcgcttgtggtccctgcagaccccgaacgctccggagggccaatcaacaccacacccgacatcggcccagaatggaatctatgactccggttgtccattgctggagctccgtccccagctcggcgggccaactggctcatggggattgacaacggaacctggccactgctcggactgccagcccctgggctcctaccaaaggcccctctgcccggcgacctcgacgaccgaagacctcacgagccaagcttcaccatgtgcggcatcttcgcctgccacaagtgagtcgtccctctcggtatccggtttcgcctttgtgaggagcgtcgcgttggtattgcgccgtgccgccgatggaggggcaagttttgccccgctatcgcgccctctcgcaaaactcgtcatcaccacactctcacaatgcggggcttccgctgacacggacaacagccacccggatgtggtcaagttcaagccgactgctctgaaactctccaaggcgtaa

SEQ ID NO: 3875 - protein, 207 aa, Myceliophthora thermophilia
MDLGAAYCSKPLERQIETRNLSFSEMHCVPHLQRASSSRGRLWSLQTPNAPEGQSTPHPTSAQNGIYDSGCPLLELRPQLGGPTGSWGLTTEPGHCSDCQPLGSYQRPLCPATSTTEDLTSQASPCAASSPATSESSLSVSGFAFVRSVALVLRRAADGGASFAPLSRPLAKLVITTLSQCGASADTDNSHPDVVKFKPTALKLSKA

SEQ ID NO: 3876 - DNA, 1758 bp, Myceliophthora thermophilia
atgagcggctcaattgactcggattatctcgcagaattcggcatcggggacccgattggaacgacgctgactcttgctttgtcgcattttacaggcggcagtgtcacctgccacaacacaagtatgctttgtacccgggctccaaaccgcaagggggcttcgctaactcttttcgcagttctgtgccatgagcgtctcagcatcgtcggcgttgaaagtggagcgcagccactcaccaacgccgatgagagcattatcctggccgtcaatggcgagatttacaaccatcgtctgatccggaagagcctgaagaagccataccacttcaagactgcctcggactgcgaggtcattattcctctgcacctcgatggcatgttctccttcgtcttgtacgacaagaacctggaccgcattatcgccgcccgcgatccgatcggcatcaccaccctttaccagggctggtcgtccgagcaacccggcaccgtctactttgcctccgagctcaaggctctgcaccccgtgtgcgacaagatcgaatcgttcccgcctgggcacatctacgacagcgcgaccggtgagcggatccggtatttccagccgtcatggtgggacggccagaggatcccggagaagccggcggatctgaagctgctgcgcgagacgctcgagaagtcggtcaggaaacgtctcatggccgaggtcccgtacggtgtcctgctttccggcggcctggattccagcctggttgcgtccattgcccagcgggagacgaaacggctacggaagctggcagaggaggccaacggcagcgcctttgagcagacgggcgatgcggaccggggcgaaggattggttggcattgacgacgagaacaagctgtcgaccatgaccttcctgccccagctcaactccttctcgatcggtctccccgggtcgcccgacaacgaggcggcgctcgaggtcgccaagttcctcggtaccaagcatcacgtcatgaccttcacgattgaggatggcctcaacgcgctttcggacgtcatctaccacctggagacgtacgacgtgaccaccatccgcgcctccacgcccatgtacctgctctcgcgcaagatcaaggccatgggtatcaagatggtactcagcggcgagggcagtgacgaaatcttcggcggctacctgtatttccacggcgcgcccaacaaggccgccttccacgaggagtgcgtgcgcagggtgaagaacctgcatctcgctgattgcctgcgcgccaacaagtcgacttcggcctggggtcttgaggcccgcgtgcccttcctggataaggagttccttgaggtctccatgaacattgacccccaggagaagatgatcacgtccgagaggcttgagaagtacattcttcgcaaggccttcgacaccagcgatgagcccgacacggagccgtacctccctgagagcatcctttggcgccagaaggagcagttctcggacggcgttggctacgggtggatcgatgctctcaaggagcatgccgagcggcacgtcaccgacgagatgatgaagaaccccaagcccgagtggggctcggatatcccggataccaaggaggcgtactggtaccgcctcatgttcgacgaacacttcccgccgtcgtgcgcctcgaccgtcatgcggtggacccctaagtggtccaagcagactgaccccagtggccgggccatccccatccacaaggccaagtacaacgatgcttaa

SEQ ID NO: 3877 - protein, 585 aa, Myceliophthora thermophilia
MSGSIDSDYLAEFGIGDPIGTTLTLALSHFTGGSVTCHNTSMLCTRAPNRKGASLTLFAVLCHERLSIVGVESGAQPLTNADESIILAVNGEIYNHRLIRKSLKKPYHFKTASDCEVIIPLHLDGMFSFVLYDKNLDRIIAARDPIGITTLYQGWSSEQPGTVYFASELKALHPVCDKIESFPPGHIYDSATGERIRYFQPSWWDGQRIPEKPADLKLLRETLEKSVRKRLMAEVPYGVLLSGGLDSSLVASIAQRETKRLRKLAEEANGSAFEQTGDADRGEGLVGIDDENKLSTMTFLPQLNSFSIGLPGSPDNEAALEVAKFLGTKHHVMTFTIEDGLNALSDVIYHLETYDVTTIRASTPMYLLSRKIKAMGIKMVLSGEGSDEIFGGYLYFHGAPNKAAFHEECVRRVKNLHLADCLRANKSTSAWGLEARVPFLDKEFLEVSMNIDPQEKMITSERLEKYILRKAFDTSDEPDTEPYLPESILWRQKEQFSDGVGYGWIDALKEHAERHVTDEMMKNPKPEWGSDIPDTKEAYWYRLMFDEHFPPSCASTVMRWTPKWSKQTDPSGRAIPIHKAKYNDA

SEQ ID NO: 3878 - DNA, 714 bp, Myceliophthora thermophilia
atggacgaaacactcggtcgtctgctcgaccggtcctgggacttgttcctgaaaacgcccgaggacacgcgattcttgattgccgttggcggcattcccggttcaggcaaaaccaccctctccaagcgcctcacggccgcgctcaacgcccggcacgcggcccagttccccgggcggccccccgtcgccgtgttcgtgcccatggacggctaccactacacgcgcgcccagctcgacgccattccggacccggccaccgcccacgcccgccggggggccgagttcaccttcgacggcgccgccttcttgcggctggtccggcgcctcaaggagccgctgaccgacggctcgcccaccgtcctggccccctcgttcgaccacgcgctcaaggacccgaaggaggacgacatcgcggtcgagaggacgcaccgcatcgtcgtgctcgagggcaactacaccctcctcaacaagccaccctggtccgacgcggcgtcgctcttctccttcaccgtcttcgtctcggtcccgcgcgaggttgcccgcgctcgcctggcggcgcgccacctggccgccggcctcgtcgccacccccgaggccgctgaccgccgcgccgtcgagaacgacctgcccaacggcgacgagatcctccggctgcggatcccccgcgtggatgaggtggtcgagagtcgggaagacggcgggtgggcgaactag

SEQ ID NO: 3879 - protein, 237 aa, Myceliophthora thermophilia
MDETLGRLLDRSWDLFLKTPEDTRFLIAVGGIPGSGKTTLSKRLTAALNARHAAQFPGRPPVAVFVPMDGYHYTRAQLDAIPDPATAHARRGAEFTFDGAAFLRLVRRLKEPLTDGSPTVLAPSFDHALKDPKEDDIAVERTHRIVVLEGNYTLLNKPPWSDAASLFSFTVFVSVPREVARARLAARHLAAGLVATPEAADRRAVENDLPNGDEILRLRIPRVDEVVESREDGGWAN

SEQ ID NO: 3880 - DNA, 420 bp, Myceliophthora thermophilia
atgcccatcatctcaattccccccaccagatgcaatgctaacaatgaactcgacacatctcatattcgagtcggtgactcgaagcctcttcccacacgagttccgtctcacaagcgtgacggccggtttcgctcgttcgttgcccgtgtcccccttgtcgtttcaatctcgacaatcccaacggatcgagctgtcaatggcctggccccggtcaattgcgcgccgctgactggcctggactggctcaaaatccactttgttgagggagcttgggccaccccagctaccgtctgcatggaggcggtcaaccttaacatcagcagttccggccctattaggtttagcgctggttccaggcgtcgtcaacaaatctcgggccccggcaaggggatccggaggagatccaggctttggggttga

SEQ ID NO: 3881 - protein, 139 aa, Myceliophthora thermophilia
MPIISIPPTRCNANNELDTSHIRVGDSKPLPTRVPSHKRDGRFRSFVARVPLVVSISTIPTDRAVNGLAPVNCAPLTGLDWLKIHFVEGAWATPATVCMEAVNLNISSSGPIRFSAGSRRRQQISGPGKGIRRRSRLWG

SEQ ID NO: 3882 - DNA, 1794 bp, Myceliophthora thermophilia
atgcccgcgctgacgaagctgaactacagtccaggcgaccagcacaatagctctgctaattgctttgagccgcctccgcaacgggtctccgagtggactgcccaagagatcgccacgctccagagccggcttgacaagcagctcgggcccgaatacatttcgacgcgcccaggaccgtcgggccaaaaactgcactacataaccgcagagaaactcatacagctcgcaaacgaggtctttggcttcaacgggtggtcatcggccattcgggatattaagatcgactacttcgataaagatgagcgggcgggcaagtacgaaatcggggtgaccgtcattgtgcgtgtcacactccgcgacggcacgtaccatgaggatcttgggtttggacacaccgagaacatcagaaacaagtaccaggccttcgaaaaagccaagaaggcgggtaccacggacgcattgaagaggacactgcgtcagttcggcagcttgctgggcaactgcatctatgataaggcgtacctatccaaggtcaccaaattgaagccggtgcccgtcaggtttgatgagaatgctctacaccgacatccggattatgtggccaagaaggagcccgcggcagccggggcaatcaaggaggagatgccggccccgccgatgcggccgccaccacttccccaggatgagaagcacctgctgaatcgtgagacagttgagattctggaggcctttgaggatttcttggtggacctggacgaggcagacttcaacgagggtgacccagacgattttgatgcacccgactggactgacgcggagctaagcaacttgcatgttcctgacaacgacagtaacgaagtagggaatgctgggaacaatgttaagtacccagcagccaagcagttagcaagcacaggttcgacgggcaaccgtggtcctcccaacggccggcctcctcagcagttcaaccaggctcggcccgcaccccagcggaacaacgccgccaaccagaaccagaaccagaaccagaaccaaattcagaaccagaatcagaaccaaaaaccacagattcacatgacgcctccccaaagcagcaacagcaacagcaacaataacaacaacaacaacaacaacaacgccggacctccacccggcgacgaacccgtcggcttcttctcagcccgcgcagttaagggcctgccggaggagacactggcaacgggaaagttgaccccaaagccgggtcaggccttcaatccgcgcctcgaaagcccttcgattcccaggacgccaggcatcgatcactcaaccaccaagccgttgagtaaaagcggtcagcacgtacccggaagaaagtctgacgagacggaggcgttctcgaacaattcgcttgctgctaatacggctgcccccggggggggcgggaccgggaacgccgctggacccggccgtcccggcctcggtgccggtcccgctgctggaccaaagatagccaacgtggtcaatccgcaacttgatcagacgcggaggatcggcgcgcccatttcgtccagcccgctggggaatcgcggtcaattccggccgttgaccgtcaagaggcctgctgcgggggcagatacggcgaacggggccggcgctggggttgcaaacgggaatggcggcaccacaactactgcaggaagggtgccgttagcggatgtgccgagtaatcgtgccctcggggccgccggggggaatggaggcggtggggggcctggcatcggaccggaggcgaagaggcagcgagtttcttga

SEQ ID NO: 3883 - protein, 597 aa, Myceliophthora thermophilia
MPALTKLNYSPGDQHNSSANCFEPPPQRVSEWTAQEIATLQSRLDKQLGPEYISTRPGPSGQKLHYITAEKLIQLANEVFGFNGWSSAIRDIKIDYFDKDERAGKYEIGVTVIVRVTLRDGTYHEDLGFGHTENIRNKYQAFEKAKKAGTTDALKRTLRQFGSLLGNCIYDKAYLSKVTKLKPVPVRFDENALHRHPDYVAKKEPAAAGAIKEEMPAPPMRPPPLPQDEKHLLNRETVEILEAFEDFLVDLDEADFNEGDPDDFDAPDWTDAELSNLHVPDNDSNEVGNAGNNVKYPAAKQLASTGSTGNRGPPNGRPPQQFNQARPAPQRNNAANQNQNQNQNQIQNQNQNQKPQIHMTPPQSSNSNSNNNNNNNNNNAGPPPGDEPVGFFSARAVKGLPEETLATGKLTPKPGQAFNPRLESPSIPRTPGIDHSTTKPLSKSGQHVPGRKSDETEAFSNNSLAANTAAPGGGGTGNAAGPGRPGLGAGPAAGPKIANVVNPQLDQTRRIGAPISSSPLGNRGQFRPLTVKRPAAGADTANGAGAGVANGNGGTTTTAGRVPLADVPSNRALGAAGGNGGGGGPGIGPEAKRQRVS

SEQ ID NO: 3884 - DNA, 2430 bp, Myceliophthora thermophilia
atgaggccaattgatctcgccagccggtcgggcgtggccctgaagagggcattccaagcgcaacagctccgccgtgtggcgagcacgcgagcatactcgaattcgaccgggcccctcctccctccgacgtatgagcggctctacaacaagtacgccgaggtccgccgcgtgctgggcacgcagcggctgacgctggcggagaagatcctgtatagtcacctggacaacgtcgaggagtcgttgctgtccaacacgaacaatggtcgcgacatccgcggcaacgccaacctcaagctgcggcccgaccgcgtcaacatgcaggacgcctcggcccagatggccctgctgcagttcatgtcgtgcaacctgccgaagacggccatccccgcgagcattcactgcgaccacctgatcgtcggcgagcgcggcgccgacgacgacctggccgccggcgtcaagacgaaccaggaggtctttgacttcctcgagtcggccgccaagaagtacggcatcgacttctggcccccgggcgccggcatcatccaccagaccgtgctcgagaactacgctctcccgggcctgatgatgctgggcaccgacagccattccccgaacgccggggggctctccaccatcaccatcggcgtgggcggagcggacgccgtcgaggcgctcgtcggcgccccctgggagctcaaggcgcccaagatcctgggcgtcaagctgaccggccggctgaacgactgggtgtcgcccaaggatctgatcctccacctcgccgggctccttaccgtccgcggcggcaccggttatatcgtcgagtacttcgggcccggcgtcgacacgctgagcctcacgggcatggcgacggcttgcaacatgggcgccgagatcggcgcgaccacctccatcttcccctacaccgaagcctcgagccggtacctgaaggcgacccggagagagcaggccagcagggacgccgaagtcttccagaacttccccggcgccggcgctaccgaggacgccttcttcaggttcagggccgacgagggcgctcagtacgaccagctcatcgagatcgacctgtccaagctcgagccgcacatcaacgggcccttcaccccggacctggccaccccgctatcgcagttcaagaagacggtccaggaagagcggtggcccgagaagctgtcggcgggtctcatcggcagctgcactaacagctcgtacgaggacatgacgcgcgtcgagagcctcgtccgcgaggccgagaaggccggcctcaagcccaaggccgacttctacatcacccccggcagcgagcagatccgggcgacgctcgagcgcgacgggaccctcgagacctttaccaaggccggcggcgtcctcctctcgaacgcgtgcggcccctgcatcggccagtggaagcgccacgacggcgtagagaaggggacgcgcaacgcgatcctgacgtcgtacaaccgcaacttccgcggccgcaacgacggcaaccccgagaccatgaacttcctcgcctcccccgagatcgtcaccgccatggcctacgccggctccaccaccttcaaccccatgaccgacaccctgaccaccccctcgggcgccgagttccgcttcccgcccccgcgaggcctcgagggtccccggacgcccttcgagcagggcaagcaagccttcgccgtcgcctcccagccgcccgacccgacggtgcgggtggccatctccccctcctccgagcgcctcgccctgctcgagcccttcgaccccttcccgcagtcggacctcgccggtctgcgcgtgctcgtcaaggtcgccggcaagtgcacgaccgacaccatctcggccgcggggccgtggctcaagtacaagggccacctgcccaacatcagcgccaacacgctcaacacggccgtcaacgccgagacgggcgaggtcaacgtcgcctacgactatctggcgtctccttcttcccccgagaaggtgacgatcccggagctcgcccgccgctggaaggagcgcggccagccgtggctcgtcgtcgccgagcacaactacggcgagggttcggcgcgcgagcacgcggcgctgcagccgcgctacctgggcgcgcgcctcatcgtgtgcaagagcttcgcgcgcatccacgagaccaacctgaagaagcagggcgtcgtcccgctcaccttcgccgacccggcagactacgagcgcatcgctgccggcgacgaggtcgccaccctcggcctgtacgagatgctgcagcgcggcggcgagggggacgtccgcctcgaggtcaccaagcgcgccaccggcgaggtctttgaggtccccgtcaagcataccgtcagccaagaccaggccaagttcatcctggccggcagcgcattgaacctcttgtccaggggaggttaa

SEQ ID NO: 3885 - protein, 809 aa, Myceliophthora thermophilia
MRPIDLASRSGVALKRAFQAQQLRRVASTRAYSNSTGPLLPPTYERLYNKYAEVRRVLGTQRLTLAEKILYSHLDNVEESLLSNTNNGRDIRGNANLKLRPDRVNMQDASAQMALLQFMSCNLPKTAIPASIHCDHLIVGERGADDDLAAGVKTNQEVFDFLESAAKKYGIDFWPPGAGIIHQTVLENYALPGLMMLGTDSHSPNAGGLSTITIGVGGADAVEALVGAPWELKAPKILGVKLTGRLNDWVSPKDLILHLAGLLTVRGGTGYIVEYFGPGVDTLSLTGMATACNMGAEIGATTSIFPYTEASSRYLKATRREQASRDAEVFQNFPGAGATEDAFFRFRADEGAQYDQLIEIDLSKLEPHINGPFTPDLATPLSQFKKTVQEERWPEKLSAGLIGSCTNSSYEDMTRVESLVREAEKAGLKPKADFYITPGSEQIRATLERDGTLETFTKAGGVLLSNACGPCIGQWKRHDGVEKGTRNAILTSYNRNFRGRNDGNPETMNFLASPEIVTAMAYAGSTTFNPMTDTLTTPSGAEFRFPPPRGLEGPRTPFEQGKQAFAVASQPPDPTVRVAISPSSERLALLEPFDPFPQSDLAGLRVLVKVAGKCTTDTISAAGPWLKYKGHLPNISANTLNTAVNAETGEVNVAYDYLASPSSPEKVTIPELARRWKERGQPWLVVAEHNYGEGSAREHAALQPRYLGARLIVCKSFARIHETNLKKQGVVPLTFADPADYERIAAGDEVATLGLYEMLQRGGEGDVRLEVTKRATGEVFEVPVKHTVSQDQAKFILAGSALNLLSRGG

SEQ ID NO: 3886 - DNA, 1845 bp, Myceliophthora thermophilia
atgtctccgtctactaccgcttcgaccaagtcccgcagctctttcacaagcccgcggattgatcccggcgcacctatcattaactgctcctatcccggatgccccgccaagattgacggaaaacgccagatcatgtgcgaggcgcatctgcatgtcatgtccaatactgacaagtaccgggattttgcccaggaaaatggcacacacacggcacaggcccccaagggcacttttggcatccctcttcagactctctcatcgacgaatccaaggcagctcttacccgacactgccaaggaccggccaatcacaggccgcaaaccggctgggaacccgccgcatgcccaacaacagcccccgccgaagcatagcacgttccctttccttcgcggcgagtcggtcatgacgccgacctcagtcaggcctctggctcctcggcctcctgcacacttgcccaccgcaggtccggcagcagccttgcgtgatggggagcctatgaggaaacggccaagactatcgccagccccaggccaaactccgaacgtccaagtgaatggggcggtacaggtaccatccctgccttcgcccgcggactctgtctccaggaacggaccgcagtcatcccaacctggaagagctagggaggcggaggtcaagagtagcccaaagcagagtttcaggcatcctgtgaggagaatgccgcttgaactgtccagcttgcggttcatcgatgacccagaagatcgccctccaggcatggtgtccgaacagtctggccctggtgtgcgcagcgccggcgggagcgatttccggaaagagtccggggcgtcagactggttacccaacgggaatatcagagaccacacagagcgaaagactagcagctctgcctcatctacaactcttgctgcatctatagactcagagggggcgaaacagaggccattagagttgcggagcgggcaggatccaacgctttcgcctgacaagacaaaactgggtgcccaacccggtcatgagcctaaccgagcaaacggcgtcgccacttccgaaccgcgccctgagggagctcgggtccccatccggcctgtaaccaccgctacagcccaccctattcaggcccggaaaacaaaggagatagacattgattatttcgacgccctcatctactcccaaccaggcgcctcatccccgccacccaacgttgacctggtccttgcggccgtaccaccaccaccaccaccaccaccaccaccatcatcatcatcatcatcatcatcatccgggcccacgcctcagacagtaaaagaaactgtaccaccagaagagaaagatgaacctctgtatctggacatcgacccgcgcatccactggccgcaaccgcactcggcagcctggcacgcgagaaagcaaaaggagattcgagctcgtggaaacaggaaggccaacttcggccgtgccgctcagtccctgcggagacagcgccgggaaagagagaaggccggcttgccgtttgaggagaccctaccggataagattgcggagaacccggcctgggtcagagtgctacggcggttgaaaggcttacctcctactgcttccgcttctgcttcttcgtctcattcttcctcttctccttccttttcccatccgggggaggaggagcacgggagtggtcctctcatgaatgggagcgcaaacggggatggcgttacggagaaaagggggaagaagaagcatcccggggtaacgggaaggagggtggggaactcggggatagtggttgttacggggttgaatgggatgcagatgggatcgatgaggcgatctcgcggggacgcgtaa

SEQ ID NO: 3887 - protein, 614 aa, Myceliophthora thermophilia
MSPSTTASTKSRSSFTSPRIDPGAPIINCSYPGCPAKIDGKRQIMCEAHLHVMSNTDKYRDFAQENGTHTAQAPKGTFGIPLQTLSSTNPRQLLPDTAKDRPITGRKPAGNPPHAQQQPPPKHSTFPFLRGESVMTPTSVRPLAPRPPAHLPTAGPAAALRDGEPMRKRPRLSPAPGQTPNVQVNGAVQVPSLPSPADSVSRNGPQSSQPGRAREAEVKSSPKQSFRHPVRRMPLELSSLRFIDDPEDRPPGMVSEQSGPGVRSAGGSDFRKESGASDWLPNGNIRDHTERKTSSSASSTTLAASIDSEGAKQRPLELRSGQDPTLSPDKTKLGAQPGHEPNRANGVATSEPRPEGARVPIRPVTTATAHPIQARKTKEIDIDYFDALIYSQPGASSPPPNVDLVLAAVPPPPPPPPPPSSSSSSSSSGPTPQTVKETVPPEEKDEPLYLDIDPRIHWPQPHSAAWHARKQKEIRARGNRKANFGRAAQSLRRQRREREKAGLPFEETLPDKIAENPAWVRVLRRLKGLPPTASASASSSHSSSSPSFSHPGEEEHGSGPLMNGSANGDGVTEKRGKKKHPGVTGRRVGNSGIVVVTGLNGMQMGSMRRSRGDA

SEQ ID NO: 3888 - DNA, 1341 bp, Myceliophthora thermophilia
atgttcaggtttttcaaaagcgacttctacaactttgaggcaacccggatcctcagcagcgcaagcgccgagggttgcgagatcgccgaatttatcgaggccgtctccaagatccgagagcacgacccagagagctggtacgatgcgtggcacgagcaatcgcagagagccgaggcgatatcccgggacgcgatccgcgcgggtcacgtcgacgcagcgaggaaggcgttgctgagggcgtccaactatgccagggcgtcgggctacatgctcccgtgggcggggcaggacgagcgcgtgctccagacggccgagcggtccatctcgctgttccgcgaggccatcccttacatggattgccgcgtcatggtgctcgagattccgtaccagggcgggatcctgatgcctgcctacctatacctgccctccgccgcaggccggcaggtccgggggggaggaggaggccccgggacagaggacaccccggtgccggtcatcgtcgtccccgggggcgccgatgcgacgcaggaagagctctactttgtctttgtctccaccggggtcagcctcgggtacgcggtcgtgaccttcgacgggcccgggcagggcctggtgttgaagaagcacagagtggtcatgcggccggacttcgaggtcgtcaccggcacagtcttggatcacgtccagcacatggccgccgccaacccggacctgggcctcgacatggaccgcgtcggcatcctgggcgcgtccatgggcgcgtactacgccctccgctcatccgtcgacccccgggtcagggcgtgcgtctcgatcgaccccttctacgggctctggcggctcgcccggacccgcatgccctcctggtacgccggcctgtggacgtcgggctggctgcccgacagcgtcctgaacgcctccatctacctccagatgcgcctgcacttcccgacccggtgggagttccagctcgggatggccatgatggggaccgccacgcccggcgacacgctgcggcgcttccgggacttcgacctcgacgtcgcccccgacggcaagggacccatcgtcgaccggatccgctgcccggtcctgctgacgggcgcgtccaggtccgtctacgcctcggcgggcgagagcacgatagccatctacaacgccctctccggcgtgtcggagagccaaaaagaggtctggatcccggaggagatcggcaacgggggcatgacggccaaggtgggagcttgggggttgctctcccacaagaccttccgcttttttgacaggtggttgcgcgtcagccgtgacaagaccgaaggcaatggccatgtatgtatatga

SEQ ID NO: 3889 - protein, 446 aa, Myceliophthora thermophilia
MFRFFKSDFYNFEATRILSSASAEGCEIAEFIEAVSKIREHDPESWYDAWHEQSQRAEAISRDAIRAGHVDAARKALLRASNYARASGYMLPWAGQDERVLQTAERSISLFREAIPYMDCRVMVLEIPYQGGILMPAYLYLPSAAGRQVRGGGGGPGTEDTPVPVIVVPGGADATQEELYFVFVSTGVSLGYAVVTFDGPGQGLVLKKHRVVMRPDFEVVTGTVLDHVQHMAAANPDLGLDMDRVGILGASMGAYYALRSSVDPRVRACVSIDPFYGLWRLARTRMPSWYAGLWTSGWLPDSVLNASIYLQMRLHFPTRWEFQLGMAMMGTATPGDTLRRFRDFDLDVAPDGKGPIVDRIRCPVLLTGASRSVYASAGESTIAIYNALSGVSESQKEVWIPEEIGNGGMTAKVGAWGLLSHKTFRFFDRWLRVSRDKTEGNGHVCI

SEQ ID NO: 3890 - DNA, 1233 bp, Myceliophthora thermophilia
atgcctgcttccgagttgggacaaacgcagtcggacggggcccggcttccgtcattttactcgcccaggccggaagcgcacagcagcacgtcgcacagcgacggcgaactggagcatgccgacttctcactctcgacgggcaaccactccgcccctgagacggtggccgaggatgcagacggttcggacgcaacacaacctacgcccgcgcaagcgtccacgccattgacgcaaccaccgcccccctccctgctctcccccgccttcacaccacccgccacgcctgggacgagcacgccgagcggcgctggacccgccgtcccctcttccgaaccgcggggcatccccgtggacagctcgatcccgacaggcgggtgtggcaccaagcatccgcggctgctcgaaacattaccagaggttgagtgcatagtgcgcgcgcgcatcccgacaactaccggggccgagatgttcctgcacctctacaagaacaatgtggacaacaaggagcatctggccattgtgtttggcggcaacatccggagcaagtcccttgacgccgtgagggagggagagaccgagatggaccgcctcgtgagaggcgcctacaccggccgtctctatcccgggaggaccaccagcgggctgccggaaacggcgtccgacggccaatccggtgcggcgcccccggactatgggccgccgctggtgaggatacacagcgagtgctacacgggagagacggtctggtcggcgcgttgcgactgcggcgagcagctcgacgaggcggcgaggttgatgtctctccccggcaacaaggcgggcgggatcatcatctacctgaggcaggaaggtcgcggtatcggcctgggcgagaagctcaaggcgtataatctccaggacctgggatccgacacggtcgaggcgaacctgctcctgcgccatccggccgacgctcggagctacggtctggccaccgccatgctgctcgatcttggccagaaagagatccggctcttgaccaacaacccagacaagattcgcgccgtcgaaggccctcaccgcgaaatcgtcgtcaaggaaagagtcgcaatggtgccgctgtcttggaaggggaaagggggcttcagaacgcccgaggtggaaggctacttgaagaccaaggtacgacgttctctcgaacccccccccccccccccctcggagcatgccatcacaagcccattccgaggctaa

SEQ ID NO: 3891 - protein, 410 aa, Myceliophthora thermophilia
MPASELGQTQSDGARLPSFYSPRPEAHSSTSHSDGELEHADFSLSTGNHSAPETVAEDADGSDATQPTPAQASTPLTQPPPPSLLSPAFTPPATPGTSTPSGAGPAVPSSEPRGIPVDSSIPTGGCGTKHPRLLETLPEVECIVRARIPTTTGAEMFLHLYKNNVDNKEHLAIVFGGNIRSKSLDAVREGETEMDRLVRGAYTGRLYPGRTTSGLPETASDGQSGAAPPDYGPPLVRIHSECYTGETVWSARCDCGEQLDEAARLMSLPGNKAGGIIIYLRQEGRGIGLGEKLKAYNLQDLGSDTVEANLLLRHPADARSYGLATAMLLDLGQKEIRLLTNNPDKIRAVEGPHREIVVKERVAMVPLSWKGKGGFRTPEVEGYLKTKVRRSLEPPPPPPSEHAITSPFRG

SEQ ID NO: 3892 - DNA, 1992 bp, Myceliophthora thermophilia
atgggccgcccctcgttcatacccaaaagcagttcatccctaacgagcctcctctccaataacgaaaattccctcctaccgcgcccagtgtaccagaagccgaagattcggacgctgctgggccattgcttatatcggagggtcatcctatggactgccgcgggcctagcccttctcttcctcaccctcagctccggcaagcgcgagctccgcagggaacggctgctagatttggtacactccaagccgtatgcgaaggacaccagttacgtccatggagccaagggcatcaagaacgacccgggggtcgtcgtggtagtagcgggctcggagaattcggaggaagggagtccctcaaactggcgcgaaggcatgccgcactggttaaaatacaaacacctcgatggcttctttgtcggcctcaaggccctcgtgcccgcccgcgaatacaaacccgagtaccccggactgccgggtgagaagtccccatacccgctcacgatatcctatacgggcttgccaacacccaccccgtatgtgcctcagccggactatgaatcgcccgagtacaaggcccagtaccacccagtcaaaccgtgctatctcgacaaagacaacaagattcccgttcccgatctctacgcgtacaacggcgtcgtccagggccaaccggagcccgtcattggctcccatggcctccttgggctgagggacgatgtttgcttcgacagatttgggagatacggcccctatggtttggggtacagcttcgaggaaggaggtgtggaagtcggtatggacacagagcgggcggggtctgatgcagtgtgggcaaagacgggcaagataaattacgacaacattgattggggagaggcgcaggattggtgctacgaatccaacaaggagcggttcgtagagtccggtgcccaaactcagccctccccgaccagatcgacgacgacgaacgccgagcggtcctctagcagcagcggcgggacccaaaagaagaagatcccgcggactgccgtcgtggtccgggcatacaccggttttcagtggacgcatcacgcggtcctcaacttccgcgccatgatttcggagctcgccctgcggtccggaggtgaatacaccgtccacttcctccttcacgttcgcgatgacaacgaggccatctgggcagatccggcgacggcccaacgagtcctcgacgacaacgtaccagccgagttccacagcatctgcacgctctggtcggaggaacagatgcgcctcgtctatcccgggcagttcggccgcagcttctccaaccccagcggcggcgacatacacggcgtctaccgcagcgcgcacatgccgctccagtacttcgccatgaaccatccggagtacgaccacttctggaactgggagctcgacatgcgctggctcggcaactactacgagctctttgaccgcctgggcacatgggccaagcagcaatctcgcgtcggcgcctgggaacggtccgccaagtactacatcccgcgctaccacggcgactgggccaacttcaccgccctcgtgcacaacgagacgctcgccagcggacgctcgcccatcttcggccccgtctccttcgccggccgccgctgcagcttcatcccgccgtcgtgcgcgacccgcaccgatccggcctgcggcgtgggcgaggacgccgacctcatcacgctcaacccgatcttcgacgccgaggactcgggctgggtgttcgcgtcggacgtgacgggctacaacacggcgctgccgccgccgccgcggcggtgcgccatcgtgacggcctcgcgcctcagccgccgcctgctggccgccatgcacgaggagacgtggcggctgcgccacaccatgttcagcgagatgttcccggccaccgtggcgctgcaccgggggctcaaggccgtctacgcccctcacccggtctcgctcgaccgccgctgggacctcgccgccgtc

SEQ ID NO: 3893 - protein, 663 aa, Myceliophthora thermophilia
MGRPSFIPKSSSSLTSLLSNNENSLLPRPVYQKPKIRTLLGHCLYRRVILWTAAGLALLFLTLSSGKRELRRERLLDLVHSKPYAKDTSYVHGAKGIKNDPGVVVVVAGSENSEEGSPSNWREGMPHWLKYKHLDGFFVGLKALVPAREYKPEYPGLPGEKSPYPLTISYTGLPTPTPYVPQPDYESPEYKAQYHPVKPCYLDKDNKIPVPDLYAYNGVVQGQPEPVIGSHGLLGLRDDVCFDRFGRYGPYGLGYSFEEGGVEVGMDTERAGSDAVWAKTGKINYDNIDWGEAQDWCYESNKERFVESGAQTQPSPTRSTTTNAERSSSSSGGTQKKKIPRTAVVVRAYTGFQWTHHAVLNFRAMISELALRSGGEYTVHFLLHVRDDNEAIWADPATAQRVLDDNVPAEFHSICTLWSEEQMRLVYPGQFGRSFSNPSGGDIHGVYRSAHMPLQYFAMNHPEYDHFWNWELDMRWLGNYYELFDRLGTWAKQQSRVGAWERSAKYYIPRYHGDWANFTALVHNETLASGRSPIFGPVSFAGRRCSFIPPSCATRTDPACGVGEDADLITLNPIFDAEDSGWVFASDVTGYNTALPPPPRRCAIVTASRLSRRLLAAMHEETWRLRHTMFSEMFPATVALHRGLKAVYAPHPVSLDRRWDLAA

SEQ ID NO: 3894 - DNA, 2259 bp, Myceliophthora thermophilia
atgcccctcaatccgcataccgaaatggcgggtccaacacccccgccttcgggcgtgcagaagaagcgcgggtcaaccgatgacacgccgaacgtatacgacgacgcgcgaacctactataccgccgaggagcgtcacaggaacaaccgcgccggcccacggacgcgcacgtattctcagaatagtttgctgaggcagatggagcgtttggtggtgcccgaaccatacagacgcgggagtcatgacgagtcgacgattccgcattcccgtcgtttcctgatccaagtcgagccgaccctccagagcttgcagcagcaggaagataccgaccaaaacatgcagattacgattgaagactccgggcccaaagttcttactctccgcacggcagcatccaatggctataaccgcttcgacattcgcggcacctacatgctgtccaacctgttgcaagagttgtccctcgccaaagagtatggtcgtaagcagatcatcctcgacgaggcgaggctcaacgagaaccccgtcaaccggctgtcgcgcttgatccgggaccatttctgggagggcttgacaaggcgcatcgacgcctcgagcatcgaggtcgccgcccgggaccccaaggactggactgacgatcctcgcccgcgcatctacgtgccccgaggcgcccccgagcagtacgagtactacaccaagctggcagaggagagaccggagatacggctggacgtgcagcttctcccggagaagatcacgcccgagtatgtccgggatatcaactccaagcccgggctgctagccgtggatatggaggaagtgacggacccgaagacgggggccaagacgctcagaggccggccgtttgtcgttcccggcggacggttcaacgagctgtacggctgggacagctacatggagtcgctcgggttgctgatccacgacaaggtcgacctggccaagtcgatggtcctcaacttctgcttctgcatcaagcattacggcaagatcctcaacgccacgcggtcgtactacctctgccggtcgcagcctcccttcctgacggatatggccctccgcgtatacgacaagatcaagcacgagccgggcgcgattgacttcttgcggaccgccatcctcgcggccatcaaggaatatcacagcgtctgggtggccgagccccggctcgaccccgtcaccggtctctcccgataccggcccgaaggactcggcgttccgcccgagacggaagccggccactttgtccacatcctggatccctacgtcaagaagcatggcatgacgttcaacgagtttgtcgaggcttacaactcgggcaagctcaaggagcccgagctggacacctacttcatgcacgaccgcgcggtgcgcgagtcgggccacgacaccacgtaccgattcgagggcgtgtgcgccgacctggccaccatcgacctcaactcgctgctcttcaagtacgagacggacattgcgcgcaccatccgcaacgtgtttggcgacaagctcgtcgtgcccgccgagtactgcgtcggcaacatggagcccgaccacgtggagacgtcggccatctgggaccgccgcgccaagcgccggaagctggccattgacaagtacctctggaacgaggccgagggcatgtactttgactacgacacggccaagcgcacccagtgtacctacgagagcgccaccaccttctgggccctctgggccggcgtcagcagccccaagcaggccgccgccatggttaccaaggcgctgccgcgcttcgaggcctttggcggcctgctctcgggcaccaaggagagccgcggcgaggtcggcctcgagcgtcccaatcgccagtgggattatccctatggctgggcaccgcagcagatgctggcctggacggggctgtaccggtacagcttcactgatgaggccgagcggctggcgtacaagtggttgttcatgatcaccaaggcctttgtcgacttcaacggcgtcgtggtcgagaaatatgacgttacgcggccgatcgacccgcaccgcgtggatgccgagtacggtaaccaggggctagactttaaaggtgttgccaaggagggattcggctgggtcaacgccagctacatatacggcttgcaaattgtcaacgcccacatgcgccgcgcgctgggcacgctgaccccttacgagacctttgtcaaggcggtggaggagaatcgggccaaggctcttgcggagctggtttga

SEQ ID NO: 3895 - protein, 752 aa, Myceliophthora thermophilia
MPLNPHTEMAGPTPPPSGVQKKRGSTDDTPNVYDDARTYYTAEERHRNNRAGPRTRTYSQNSLLRQMERLVVPEPYRRGSHDESTIPHSRRFLIQVEPTLQSLQQQEDTDQNMQITIEDSGPKVLTLRTAASNGYNRFDIRGTYMLSNLLQELSLAKEYGRKQIILDEARLNENPVNRLSRLIRDHFWEGLTRRIDASSIEVAARDPKDWTDDPRPRIYVPRGAPEQYEYYTKLAEERPEIRLDVQLLPEKITPEYVRDINSKPGLLAVDMEEVTDPKTGAKTLRGRPFVVPGGRFNELYGWDSYMESLGLLIHDKVDLAKSMVLNFCFCIKHYGKILNATRSYYLCRSQPPFLTDMALRVYDKIKHEPGAIDFLRTAILAAIKEYHSVWVAEPRLDPVTGLSRYRPEGLGVPPETEAGHFVHILDPYVKKHGMTFNEFVEAYNSGKLKEPELDTYFMHDRAVRESGHDTTYRFEGVCADLATIDLNSLLFKYETDIARTIRNVFGDKLVVPAEYCVGNMEPDHVETSAIWDRRAKRRKLAIDKYLWNEAEGMYFDYDTAKRTQCTYESATTFWALWAGVSSPKQAAAMVTKALPRFEAFGGLLSGTKESRGEVGLERPNRQWDYPYGWAPQQMLAWTGLYRYSFTDEAERLAYKWLFMITKAFVDFNGVVVEKYDVTRPIDPHRVDAEYGNQGLDFKGVAKEGFGWVNASYIYGLQIVNAHMRRALGTLTPYETFVKAVEENRAKALAELV

SEQ ID NO: 3896 - DNA, 1842 bp, Myceliophthora thermophilia
atggcgcctgtgcgggaccccaacacgctgtccaactacgaccaatggcggaccagacacaccaccgccaacttcaaggttgatttcgcagcaaagtgtctgcgcgggtcggtgatcctcgagctcgagtcgcagacagacaaggccagccgggagatcattcttgactccagctacgtcgacgtctcggccatcaagctcaactcgacaccttcgcagtgggtgatcaaggatcgcactggtccaaacggctccccggtccacgtcgcggtccccaacggtgccgccaagggggaagttgtcaagctcgagatcgagctggccaccactgagaagtgcaccgccctccagtggctgactccggcccagacgagcaacaagaaagcccccttcatgttcagccagtgtcaggccattcatgcgcggtctatcttcccctgccaggacaccccggacgtcaagagcacgtacgagtttaacatccgcagcccccatgtcgtcgttgccagcggtgttccggtgccgggcgcgacggtggatgcgggcgaggacaagatttacaagtttgagcagaaggtccccatcccttcctatctcttcgccgtggcctcgggagatatcgctagtgcccccatcggaaggtgctcgtcggtggctacgggtcccaacgagttgaaagcgtcgcaatgggagcttcaggatgacatggacaagttcctcgacgctgccgagaagattgtcttcccctaccaatggggagagtacaacgtcctcgttttgccgccgagcttcccgtacggaggcatggagaaccccatcttcaccttcgccacacccaccatcatcagcggtgaccggcaaaacatcgatgtcattgcccacgagctcgcccacagctggagcggtaacctggtgacgagctgcagttgggaacacttctggctgaacgagggatggaccgtgtacttggagcggcgcatcctcgcggccatccacaaaaatgatgcctatttcgacttttcggctattattggctggaagcatctcgaggaggctatcgagggattcggaaaagaccacgaatacaccaagctgtcgatcaagcacgatggcattgacccagacgacgctttcagcaccgttccttacgagaaaggcttccatttcatctggtcccttgaccgcctcgtcggacgggagaacttcgacaagttcattccctactactttaaaaagtggcagaacaagtcccttgattcctacgagtttaaggacacgtttctcgaattcttcggcgcgcctgagtatgcgggtttgaaggataagctcgcggagatcgactgggaaggccgcttcttcaataccgggctcccgccgaagcccgagttcaacacttcgcttgttgatgtgtgcttccaacttgccgagaagtggaagcagaaggactacacgccgagtccctcggacatttcgtcctggaccggcaaccaggttctcgtattcctgaacgcggtgcaggattttgaggagcccctgactgtggggcagtcgcaaaacctgggcaagatttatgggctcgccgactcgaagaacgccgagctcaagtcggcctattaccagatcgcaatgaaggccaaggataccagctcgtaccctggtgtcgccgagctgcttgggaatgtcgggcgtatgaagttcgtccgaccactgttccgctccctcaacaaggtggatcgtgatctcgctctcgggacgttcgagaagaaccgcgatttctaccatcccatctgtcgccaactggttgagaaggatcttggggtgggcgaggcgaagtcctcttga

SEQ ID NO: 3897 - protein, 613 aa, Myceliophthora thermophilia
MAPVRDPNTLSNYDQWRTRHTTANFKVDFAAKCLRGSVILELESQTDKASREIILDSSYVDVSAIKLNSTPSQWVIKDRTGPNGSPVHVAVPNGAAKGEVVKLEIELATTEKCTALQWLTPAQTSNKKAPFMFSQCQAIHARSIFPCQDTPDVKSTYEFNIRSPHVVVASGVPVPGATVDAGEDKIYKFEQKVPIPSYLFAVASGDIASAPIGRCSSVATGPNELKASQWELQDDMDKFLDAAEKIVFPYQWGEYNVLVLPPSFPYGGMENPIFTFATPTIISGDRQNIDVIAHELAHSWSGNLVTSCSWEHFWLNEGWTVYLERRILAAIHKNDAYFDFSAIIGWKHLEEAIEGFGKDHEYTKLSIKHDGIDPDDAFSTVPYEKGFHFIWSLDRLVGRENFDKFIPYYFKKWQNKSLDSYEFKDTFLEFFGAPEYAGLKDKLAEIDWEGRFFNTGLPPKPEFNTSLVDVCFQLAEKWKQKDYTPSPSDISSWTGNQVLVFLNAVQDFEEPLTVGQSQNLGKIYGLADSKNAELKSAYYQIAMKAKDTSSYPGVAELLGNVGRMKFVRPLFRSLNKVDRDLALGTFEKNRDFYHPICRQLVEKDLGVGEAKSS

SEQ ID NO: 3898 - DNA, 1878 bp, Myceliophthora thermophilia
atgggcccgcaatcggcccttactgacttcttggcgtcacacaacatttcagctcaccagattcgtcttgacgctgaagcgcgtcgcagagcggcgcagaacggacagaatgaacagaataatgacaatcagaccaacggccgcgactcggaagactcccctgataccaccccagccgtctccgctggccctgcatcggccgcgagagggagacgggcaagagcaagagcagcagcaggcccaaattatgaggaggcgcggaacaaggagaagaaggccatcgagaaaatcaaggccagcaaaaagtttcagaagcggaaacgtgatgcggaatcggatgacgaagatgatctcgtgcaggcccttcaacggagctctgcgccacttccaggccagcaggagaattgcgagaattgcgggaaacgatttactgttactccctacagccgaaacgggcccaaagggggattgctctgtagcccgtgcagcaaggagctcgataagaaggatgaggcagcgaggaaaaagaagccaaagcgagccacgggcggagcggttggtgttcgccggcagctgcagagtagcatcctggacggaacatactcacttggtgccaagagcttgatgactctttgcatcgagacgctcgcaaagaatatcgatcttgccgaagatctgggagatttgccatcggacatcattgataagattgctcgaaggctctctaaacttcgcctgcttgactcaagaacgttaagtctgttcctgcagcccgcggcagaggaagtcaatatatacgatggggccaagctcaactccgacgattacatccgtatcttccaagttgttcggggcctgaagaagctcaaggtccgtaacgcgattcatttcaaagacgatgtcatggactacctcatttcgcgcaatattgagctcgaaggcctctacctccacggcgcgaacctgatctcggaatcaagatggacggagtatctccaaaagaagggccgcttcctccgctcgctgcgcgtctacttcaccgacaagcattttggcgacagcgtcctcgccctgttgcccacgacctgcccctctctcaaccggctcaaggtctgccacaaccaagaagtgacgggcgcgggcgtcgcggcgattgcacaaattcccaccctccgccacctcagcctcgatctacgcaacgaactccactcggacgtctacgtcgaccttatcagcaagatcggcgcccacctgcaaacgctctccctcacgcgggtgcacgacgccgacaacacggtgctcgacgcgctgcacgcgcactgccgctcgctctccaagctgcgcatcaccgagagcgaggccatgacggacgccgggttcgtccgcctcttccgagactgggcgaacccgggcttggagttcctcgacctgcaaaagtgccgccagctcgactcggcgcgcccgcgcgagaacccggacggcatcggcctgtgctctgacggcttccgcgctctgatggcgcactcgggaaagacgctccgcgagctgaacgtccacgcgtgcaggcatattgagagggtcgcgttcgaggatgtgttcggcgtcaagaacggccggcctggtggtggcagcgcccagatgtacgaggccctggcgaagctggagatcagcttctgcgaggaggtcacagattatgtcgtgggctccatcttccggagctgtccgaatctgagggagctgaacgtgtttgggtgcatgaaggtcagggacgtgagggtgccgaggggaaagatcctggtgggcgtgcctaatgcgaggggcatggtcattgagggtgatgacgatgacgatgatggggatgcatgggggatgtattag

SEQ ID NO: 3899 - protein, 625 aa, Myceliophthora thermophilia
MGPQSALTDFLASHNISAHQIRLDAEARRRAAQNGQNEQNNDNQTNGRDSEDSPDTTPAVSAGPASAARGRRARARAAAGPNYEEARNKEKKAIEKIKASKKFQKRKRDAESDDEDDLVQALQRSSAPLPGQQENCENCGKRFTVTPYSRNGPKGGLLCSPCSKELDKKDEAARKKKPKRATGGAVGVRRQLQSSILDGTYSLGAKSLMTLCIETLAKNIDLAEDLGDLPSDIIDKIARRLSKLRLLDSRTLSLFLQPAAEEVNIYDGAKLNSDDYIRIFQVVRGLKKLKVRNAIHFKDDVMDYLISRNIELEGLYLHGANLISESRWTEYLQKKGRFLRSLRVYFTDKHFGDSVLALLPTTCPSLNRLKVCHNQEVTGAGVAAIAQIPTLRHLSLDLRNELHSDVYVDLISKIGAHLQTLSLTRVHDADNTVLDALHAHCRSLSKLRITESEAMTDAGFVRLFRDWANPGLEFLDLQKCRQLDSARPRENPDGIGLCSDGFRALMAHSGKTLRELNVHACRHIERVAFEDVFGVKNGRPGGGSAQMYEALAKLEISFCEEVTDYVVGSIFRSCPNLRELNVFGCMKVRDVRVPRGKILVGVPNARGMVIEGDDDDDDGDAWGMY

SEQ ID NO: 3900 - DNA, 306 bp, Myceliophthora thermophilia
atgccgatagagaaacagaagtcgcattctgcacattaccgtgcttcccttgctcagaatatcgctgagaacggttttgttgttatgccttgctcttggtgcgcgttgcaaggcctcatctgcaaaatgatcgcacgcacaaagcgttacgaggcctatgttcgtcaaggtcgttcttacgatggctctagcatcccgctttcttccttggatcgcattcttcaggagcagcgtcgtatcaaagatgctaaacgtcgtgccgaacttgagctagatgaatcccaacgccgtctggaagaggcctag

SEQ ID NO: 3901 - protein, 101 aa, Myceliophthora thermophilia
MPIEKQKSHSAHYRASLAQNIAENGFVVMPCSWCALQGLICKMIARTKRYEAYVRQGRSYDGSSIPLSSLDRILQEQRRIKDAKRRAELELDESQRRLEEA

SEQ ID NO: 3902 - DNA, 270 bp, Myceliophthora thermophilia
atgtacgtactatatgaaaagcttaaaaaggaactcgagtttgtcaagactagaataaagaactactataacaaatataggctcaagggaccttgcctagagaggggagacaaagtctacctgatcgtacaaaacttacaaaccaaacgaccaagcacgaagctagacttcaagaagatagatgttttttatatttcgcttctcgaaccaataccaaaaaacgccaaggttgccacgtacatcgaagtagaagacaaggaagaagaatag

SEQ ID NO: 3903 - protein, 89 aa, Myceliophthora thermophilia
MYVLYEKLKKELEFVKTRIKNYYNKYRLKGPCLERGDKVYLIVQNLQTKRPSTKLDFKKIDVFYISLLEPIPKNAKVATYIEVEDKEEE

SEQ ID NO: 3904 - DNA, 2172 bp, Myceliophthora thermophilia
atgtcgacgcctacgactgcaacggcaacgctgcctcactacaacccgcaccatttccgctattcccatcaccagcaccaacaccagcaccaacaccagcaccagcaccagccccagccccagcaccaggcgtacccgcaatcaaattcgtctgcgtaccgcccaccgaatccaattcttcctcctgccagccgcctggcctacccatctccgggctactcatccgctgcgagccacacgccgggaaatggcgtagccgcagggccgcccgaccacgcgagactcgctccgcacgaaccggctgatggtgattcccgactcgaccacctctacacgaccatgccagcggctccagcggcccagcctcgggcagagcaacaaccaccccgcaaaagaaggcgatcgagagagcccgactggaaggccttttacaaaaatggtttacccaaagagatcatcgtcatcgaggacacgcccgagccagagcaaccggatgcggtcgcagccgcttcgcaggcgctgacaaacggccgacaacacgccgcttccaatggcgcacccggctcctcggccaagaagcggaaacgggatgatgagccgacaccctacgatcccgtgcaccatagtgctgccatcggctcccataccccaagcaagtccactgtcgcgagcgaccgaacaaactcggccatccacaccacggcagcgacctcgcttggctcgctttcgtcgaatggccagaacggccagtatgaatacgattcaccagcgagccagaggcgaaagagaacgacccgtcagcagatcgccaacgaggccaggcgtcgcgaggccgcgggatgtgttgatgccctcgcacactatcgaccgcctcccttccctcccaagaaggctcgcgacgtgcacatcaaggttatcccggatcctcctaatgccaagaacgtccgcgtcgacgatgacgacggccactatatcgtggtcccggataacgatctgaccgataggtacaaaatggtcaagctgctcgggcaaggcacgtttggcaaggtcgtacaagccaaggacaaggtcaccaacaagttcgtcgccatcaaaatcatccggtctgtacagaagtaccgcgaagccagcaaaatcgaactccgagtgctcgaaacgcttcgagcgaatgatgaggagaaccggaaccggtgcattcacttccgagactgtttcgactaccgcgggcacatctgcattgttatggatctgctcggccagagtgtgttcgactttttgaagagcaacaatttcgtgcccttcccgaatagtcagatccagaactttgcccgccagctgttgaccagcgttgcctttctccatgatctcaacctgatccacacggacctgaagccggagaacatccttctctgcaacaacgagtaccagacgtttacgtacaacaggaagatcccgtcggccagcaccaacaacagcaaccgccaggctacccaaagaaaggtgctgctcgacaccgagattaggttgatcgacttcggctcggcaacttttcaggacgaatatcactcatcagtcgtgtctacccgccattaccgggcgcccgaaatcatcctggggctgggatggtctttcccttgcgacatctggagcatcggctgcattctagtcgagttctacaccggcgacgccctgtttcagacgcacgataacctcgagcatctggcgatgatggaggccgtcgtcgacgcccggatcgacccagcgctcgtccagcaggtcaacaggatgacgaggaacggcggaaaccccgcagccaagtatttcaagcgtctcaaactggactatcctctgccagagacgacgcgcgcatctagaagattcgtcaaggccatgaagcggctgccggttggtgtcctctctcgcatctgtcgtgatgatctcctccagaagatctttgtctacgaccccgcccggcgcatcaccgcgaaacaagctctggcgcacccctggttccgcgaagttgcgcatcccgacgacggaaccgaagcggcgcgaatccgtgccgagaaattgaaactgcgggagcagcgggagcgagagcagcgggagcgggagctgtccgggactaccctgggtccgtcgggcgtagacgagaggtcggtaaggaggtga

SEQ ID NO: 3905 - protein, 723 aa, Myceliophthora thermophilia
MSTPTTATATLPHYNPHHFRYSHHQHQHQHQHQHQHQPQPQHQAYPQSNSSAYRPPNPILPPASRLAYPSPGYSSAASHTPGNGVAAGPPDHARLAPHEPADGDSRLDHLYTTMPAAPAAQPRAEQQPPRKRRRSREPDWKAFYKNGLPKEIIVIEDTPEPEQPDAVAAASQALTNGRQHAASNGAPGSSAKKRKRDDEPTPYDPVHHSAAIGSHTPSKSTVASDRTNSAIHTTAATSLGSLSSNGQNGQYEYDSPASQRRKRTTRQQIANEARRREAAGCVDALAHYRPPPFPPKKARDVHIKVIPDPPNAKNVRVDDDDGHYIVVPDNDLTDRYKMVKLLGQGTFGKVVQAKDKVTNKFVAIKIIRSVQKYREASKIELRVLETLRANDEENRNRCIHFRDCFDYRGHICIVMDLLGQSVFDFLKSNNFVPFPNSQIQNFARQLLTSVAFLHDLNLIHTDLKPENILLCNNEYQTFTYNRKIPSASTNNSNRQATQRKVLLDTEIRLIDFGSATFQDEYHSSVVSTRHYRAPEIILGLGWSFPCDIWSIGCILVEFYTGDALFQTHDNLEHLAMMEAVVDARIDPALVQQVNRMTRNGGNPAAKYFKRLKLDYPLPETTRASRRFVKAMKRLPVGVLSRICRDDLLQKIFVYDPARRITAKQALAHPWFREVAHPDDGTEAARIRAEKLKLREQREREQRERELSGTTLGPSGVDERSVRR

SEQ ID NO: 3906 - DNA, 1086 bp, Myceliophthora thermophilia
atgtctgcctcccttcccggtaaccggccgcttcccgagtcacagtacgacctcagcacgtactggggacgtgtcagacatactgctggcatcacggatccgaggaccctcttcgttggcagagccggcctcgaacaagccaagaatgccttgatcgcgtacaagcaggggcaaataccgtccatgacgcccgagctatggcgggccaagaagattgtcgactcgacactgcatccggacacgggcgagccggtcttcctgccctttcgcatgtcgtgttttgtgctttccaacttggtcgtgacggcaggaatgctgaccccgggtcttggaaaccgcggaacgatagcctggcaagtcgccaaccagtcgctcaacgttgccatcaactattccaattcgaataagtcctcgcccctctcctggtccaagatcgcccagtcctacttcctcgccgtcaccgcttcctgctccgtcgccgtcggtctcaacagccttgttccgcgccttaagagcctctctccctcgacccgccttatcctctcgcgcctggtgcccttcgccgcggtcgccagcgcgggtgccctcaacgtcttcctcatgcgcagcgaggagatgcgcacgggtattgatgtattccctgtcaggccgaaaccacaagaagcaatcgaaaatggcgacgcgctgcagacgggcaacccagtggtggcagcaaccatgacaacgtcggagaaatctcaaggcaacgatgacggcgccgcggaaaagagcttgggcaagagcaagaaagccgccacgatcgccgtcgccgagacggcggccagccgcgtgttcaacagttcacccatcatggtgatcccgccgctggtgctggtacgcctgcagcgtaccgcctggttgcgcaagaacccgcgctacactcttcccgtcaacctgggcctgatcctggtcaccagctatgccgtactgccactcgccctggccgccttcccgcagcgtcagcgactgaaggccgagagcctggaggaggagttccatggccgcggtggggaaggcgggttggtagagttcaatcggggcatttag

SEQ ID NO: 3907 - protein, 361 aa, Myceliophthora thermophilia
MSASLPGNRPLPESQYDLSTYWGRVRHTAGITDPRTLFVGRAGLEQAKNALIAYKQGQIPSMTPELWRAKKIVDSTLHPDTGEPVFLPFRMSCFVLSNLVVTAGMLTPGLGNRGTIAWQVANQSLNVAINYSNSNKSSPLSWSKIAQSYFLAVTASCSVAVGLNSLVPRLKSLSPSTRLILSRLVPFAAVASAGALNVFLMRSEEMRTGIDVFPVRPKPQEAIENGDALQTGNPVVAATMTTSEKSQGNDDGAAEKSLGKSKKAATIAVAETAASRVFNSSPIMVIPPLVLVRLQRTAWLRKNPRYTLPVNLGLILVTSYAVLPLALAAFPQRQRLKAESLEEEFHGRGGEGGLVEFNRGI

SEQ ID NO: 3908 - DNA, 882 bp, Myceliophthora thermophilia
atgtctgtcgccaccaagaacctctacgacctcctcggcaacgacatcgaggaggacgagccccgccctctcgtgaagcccgtcgagaagacctcgacccacacggttaagcgcaacacggatggcctcccgccttccaagggcccggccacctccggcaaccgtcggggcggcgccaaagtcagcggtaacgaggctgtcttccgcgatcgcgacgctggacgggagtccaaccgtgctaagcccacggacgcgccccagcgtggcggtcgccgtggcggcttccgtgagcgcggtgatcgtcggccctacaggagcgctcctcacaactctgaaaagcaggctgagaagtcctggggcgccgccgagggcgagtccgagctgaaggatgagaaggccggcgccgaaatcgccgagtccgagaagaaggctgacgaggaaggtggcgaggccgaaaccaaggaggagggtcccgaggagaagcagatgacctacgaccaatacctcgcccagctcgaagagaagaaggttgacgccgagctgcgggtgcgcaagcccaacgagggcgtcaatgactctaagtggaaggatttcactcccctcaagagggatgagaacgaggactacgtccccagcaccggcggcaagaccaagcgcgagcgtgagcgcaaggccaagcagtacattgagatcgataaccgctacaaggagcctgagcgcccccgtggcggccgtggcggccgtggcggtgcccgtggcgatggtggccgtggccgtggccgtggtggtgctccccgcggcggtcgcggtggtcgcgcccaggaggccgcgccgatcgacaccaacgacgaaactgccttccccagcttgggcggcaactaa

SEQ ID NO: 3909 - protein, 293 aa, Myceliophthora thermophilia
MSVATKNLYDLLGNDIEEDEPRPLVKPVEKTSTHTVKRNTDGLPPSKGPATSGNRRGGAKVSGNEAVFRDRDAGRESNRAKPTDAPQRGGRRGGFRERGDRRPYRSAPHNSEKQAEKSWGAAEGESELKDEKAGAEIAESEKKADEEGGEAETKEEGPEEKQMTYDQYLAQLEEKKVDAELRVRKPNEGVNDSKWKDFTPLKRDENEDYVPSTGGKTKRERERKAKQYIEIDNRYKEPERPRGGRGGRGGARGDGGRGRGRGGAPRGGRGGRAQEAAPIDTNDETAFPSLGGN

SEQ ID NO: 3910 - DNA, 1218 bp, Myceliophthora thermophilia
atgacgacgagagctctggaggccagcttcgaccggctctcggtcaacgacgagaacgaccccggtgagaatgctcggctataccagaagaccaaggcatcgcagccgatgggtacctcgagccaactcacccacagcaccgccaggcaaaccctgctcaaagttgcgctgcagacgcagcacgccaacgcggtcacggcaactgtcaacctcccctcgcaagcggcccaacgaaagggcgccgtgcccccgaccgtcaaccccgcctcgcccaagaaggagaagtcgacttcattaacaacatctcgctcctcggaggagactgcgtccgagcaaccctccacggccacctacgtcgaccagccacttgtccctaagcagttccatctcggcatgttcgaaatcggccggcccctcgggaagggcaagtttgggcgcgtatacctcgcgcgggaacgcaccaccggcttcatctgcgcgctcaaggtgctctacaagtctgagctccagcaaggcacgggcgtcgagaagcaggtccggcgcgagatcgagatccagagcaacctgcggcaccccaacatcctcaagctgtacgggcacttccacgacagcaagcgcatcttcctcattctcgagtacgccggcaagggcgagctgtacaagcacctgcggcgcgagcagaggttccccgagtggaaggcggcgcagtacatcgcccagatggcggcggcgctgcgctacctgcaccgcaagcacgtcatccaccgggacatcaagcccgagaacatcctggtcggcatccacggcgagatcaagatctcggactttggctggagcgtgcacgcgcccaacaacaggcgcaacacgctctgcggcacgctcgactacctgcccccggagatgatcaagtcgggcagcaaggacaactggtacaacgagaaggtcgacctgtggagcctcggcgtcttgacgtacgagttcctggtcggcgaggcgccgtttgaggacaccccgatcatgacgcacaagcgcatcgcgagggccgacatgaccattcctgactgggtcagtaaggaggccaaggatctcatcaagaagctcctggtgcttgatccggagaagcggcttcccctcgaagaggtccagaaccacccctggatcatcaagcactgcgtgaagggtgagcgggcggccaatcgggaaaagcccctgaaataa

SEQ ID NO: 3911 - protein, 405 aa, Myceliophthora thermophilia
MTTRALEASFDRLSVNDENDPGENARLYQKTKASQPMGTSSQLTHSTARQTLLKVALQTQHANAVTATVNLPSQAAQRKGAVPPTVNPASPKKEKSTSLTTSRSSEETASEQPSTATYVDQPLVPKQFHLGMFEIGRPLGKGKFGRVYLARERTTGFICALKVLYKSELQQGTGVEKQVRREIEIQSNLRHPNILKLYGHFHDSKRIFLILEYAGKGELYKHLRREQRFPEWKAAQYIAQMAAALRYLHRKHVIHRDIKPENILVGIHGEIKISDFGWSVHAPNNRRNTLCGTLDYLPPEMIKSGSKDNWYNEKVDLWSLGVLTYEFLVGEAPFEDTPIMTHKRIARADMTIPDWVSKEAKDLIKKLLVLDPEKRLPLEEVQNHPWIIKHCVKGERAANREKPLK

SEQ ID NO: 3912 - DNA, 492 bp, Myceliophthora thermophilia
atgcccgagaacacgtacacgccgccgccttacgaggatatcattggctgccaagccgcaatcttcgagtgggccgagagtttcgactccaaagattgggatcgcctttcgaaagccattgctccgaccctctacgttgattaccgggcagtcatgggccaactgtgggagtcgatgccggccgagcagttcgtgggcatggcgtcgaacgagaagttcctcggcaaccggcgcatcaagactcagcacttcatcggcgcggggaagtgggtgcgcaccggcgagggccagataacgggctaccaccagatgcgcgtggctcaccagaagtacgaggacgacgagttgaccaaggtgcgctatgcgggacacgcccacggcaaggcgacggtgcagtaccgcaaggtcgatggcgtctggaagtttgccggtctcacgccggacatccggtggacagagcacgactatgacaagatattccaggacgactaa

SEQ ID NO: 3913 - protein, 163 aa, Myceliophthora thermophilia
MPENTYTPPPYEDIIGCQAAIFEWAESFDSKDWDRLSKAIAPTLYVDYRAVMGQLWESMPAEQFVGMASNEKFLGNRRIKTQHFIGAGKWVRTGEGQITGYHQMRVAHQKYEDDELTKVRYAGHAHGKATVQYRKVDGVWKFAGLTPDIRWTEHDYDKIFQDD

SEQ ID NO: 3914 - DNA, 2256 bp, Myceliophthora thermophilia
atgccgaggaaagcccaaacgtgggatgactatgactcggctgtcgctcagcatttaccaatcttgcagattatcctggcgccttccgactccgagttcctagaccaactgatacccgttctcaaagatgctacgacaagcagccgcattggttcgctcgtgcagagcctatcccagtacgccgacgagcgcgagagcgacatcgagcgcattggcctgaccaagcacgaggagttcctgaattctgtcaaccagctacagaaagtgcgcgagggcaccgtggcgctgacctccgagatcctggacctcaatcagtcgatccaagcaagcaccgagaaactcgctgagcagaagcaggccctcgtcaacacgcggggggttcgccagaacatcaccgatgtgtcgaacgccctcgaggaatccctcaagatcttgcacgctgtcaacagtgcgcatgaactcatccgcaagaagaagtattatgctgccctcaagtccctggaggaccttcagaacgagtacctagtgcccatcatccagaacagattcgcgacccagtacaagctggccgacatgatccaaaagtcgatccccgcctcacagaaagtgatttcggaggcagtcatgtcggatctgaacacgtggttgttcttcgtccgggagtcgtcacagttcttgggcgaggtggccttcttccacacacaggagcggagggccaggcaaaaagggcgaatagagggcaacgaattgttgagccgcttcaagctgaactcagccatcgagctggtcttcgatgaaaacgatgagttcgatgtccttaataacgaggagatcacggttgactttaccccgttgcacgaagcggtgcacatacacgaagcgctcggacagattgaccggttccgtgccgaatatgcggctactaggcggcagcagaaggagttgatcatgcccgcctctgagaacctcttctccgagaatgatgatgacgacgacgctctcaaaactttgctggaatccgttgccgggttcgcgatcattgagaaggccaccttgcagcgcgcgcctttggctcgctcaacactcgatgttgacgaactctgggactcgatgtgccaggccatcatccgaatcacgtccaagtcattagagggcgtaagcaatgcggatttgctgctaaaggtcaaggaagacattgccttgtttattcagacgatggagggctggggctattccgcctccgtggtgaataactttcaacttgtcctgttccacagatatgccgacttgctgcagcgacgattcggctcagtctttcaagagatcgtctcaacggacgattacatgcccatgaacatcaggactcgcgaggagtacgacaatttctacgtggcaaccctctttggcgatgagatgcctcctgaagaggtcacgtttcctactgtccttcccttctccaagatgtacccttactgctgtatagccatcggggagtttgagcagcagttccgggattttactcgggaaaactttgatcacacgaacatcgtggacgagactcttagagaggcactggacgaacttctcaccgacatcgtgtgccaaagcctggtggagcaactgaactctcagtatctgggccagattgtgcagattctgaccaacctcgagtatttcgaggttgcctgccaaaagctcgaaaagcttctaatccatggccggtcatctacatcggctgggggcccagtgactctgaaggcaacggagctgtttaggaaccacagaaaaaccgcagaaaaacgcatcttcgagctcgtcaactctaagattgacgatctcgtggacacctccgactacgattggcaacctagcagctacatgatgactttgactcggtttctcgagaacaacatgtcgtccacccttctgggactgccccgcgagatcaaggagctcatttactttgacgctctcagccacgcagccaacaagatcctggccctccctctctccccagacgtcaagaagatcaaccccaacggcgtagcggccatggcgctcgatgtgcagtacctgaccgacttcgtcagcaagctggataacgccttcatgctggagcagaacctggacgagctgcagcagacggtggcgctgatgcagtccgagaaccacgaggagttctacgacatttcgattcgcaacaagaagtatggccgggtagacgccgcgaacgcgcctatcctgctggagaagtaa

SEQ ID NO: 3915 - protein, 751 aa, Myceliophthora thermophilia
MPRKAQTWDDYDSAVAQHLPILQIILAPSDSEFLDQLIPVLKDATTSSRIGSLVQSLSQYADERESDIERIGLTKHEEFLNSVNQLQKVREGTVALTSEILDLNQSIQASTEKLAEQKQALVNTRGVRQNITDVSNALEESLKILHAVNSAHELIRKKKYYAALKSLEDLQNEYLVPIIQNRFATQYKLADMIQKSIPASQKVISEAVMSDLNTWLFFVRESSQFLGEVAFFHTQERRARQKGRIEGNELLSRFKLNSAIELVFDENDEFDVLNNEEITVDFTPLHEAVHIHEALGQIDRFRAEYAATRRQQKELIMPASENLFSENDDDDDALKTLLESVAGFAIIEKATLQRAPLARSTLDVDELWDSMCQAIIRITSKSLEGVSNADLLLKVKEDIALFIQTMEGWGYSASVVNNFQLVLFHRYADLLQRRFGSVFQEIVSTDDYMPMNIRTREEYDNFYVATLFGDEMPPEEVTFPTVLPFSKMYPYCCIAIGEFEQQFRDFTRENFDHTNIVDETLREALDELLTDIVCQSLVEQLNSQYLGQIVQILTNLEYFEVACQKLEKLLIHGRSSTSAGGPVTLKATELFRNHRKTAEKRIFELVNSKIDDLVDTSDYDWQPSSYMMTLTRFLENNMSSTLLGLPREIKELIYFDALSHAANKILALPLSPDVKKINPNGVAAMALDVQYLTDFVSKLDNAFMLEQNLDELQQTVALMQSENHEEFYDISIRNKKYGRVDAANAPILLEK

SEQ ID NO: 3916 - DNA, 1398 bp, Myceliophthora thermophilia
atggtgacgacaaggctccgatcgaccgccgtcaaagtggtgcagagccatctatctccgatgcttaattcgttcctacggtcctttcgccctgtgtggcagcctctcgaatttcccaccgaaaacatcaccctggttgcaccacaccagaagattgaagaagagaccattccagactatctcgcggctcgctactaccctgtccgtattggagacgtcattcataatcgctaccaagtcgtaggcaagctgggctatggcactacttcaaccgtgtggcttgctcgggacctgagtggccgtcggcacgtcgctctgaagctgtttatcctcacctcattactgggggagcacctagatgacgagatcaacatttatcatcgcatagccgacgcggctacgcgcggccatcccggccgaattgccgtccgcccgcttcttgactcttttgatgtgaagggcccggacgggcagcatcgatgcctcgtacatccgccactctgggatagcgtgctcgcgctactccatcgaaatcccgcgcaaagactaccgacgccggttcttgccgccgttctcaagtatctcttccgagcactggacttcctacacacggagtgccacattgtgcatacagacatcaaagccgataatatcatgttcgggataggggctaccgatccggtgtttaccacgtttgagcagcacgaactcaacagcccgtcgcctaggaaggaagtagatggacggtttatctacttgacccgcgagctcgctgtgccccaaaacctggcgaatccggtactatgcgacttcggctccgccgtgctgttggacgacggccgggagcaccgcgaagacgttcagccggacgcataccgcgcacccgaggttatcctcgaggcgccgtggacatacagtattgatatctggaacgtagggtgtatgatttggcatgtgttcgagggtggccacctgttcagcggccgcgatcctgagcacgcggcataccggagccgcgcgcaccttgccgagatggttgcgctgctcggcccgccaccgccaggcctgctagcgcggggcaaccgcagcagccagttcttctcgagcacgggcgagttttgcgccgggattccattgcccgccgcacggtcgcttgaggacagggagacgacgcttaggggagagcaagaggacagggcgtccttcctgcgcctcatgcgcaagatgctgcagtgggagccagaaaaacgcagctcggcgaaggagttgatggaggacgagtggctccgctgtgaaacagcggaaagcgcctgtacccagtccatttttgccagaatcaagggcttgattgacgacacagtgcgagcctcacgcagccctgacggtgccggcaactag

SEQ ID NO: 3917 - protein, 465 aa, Myceliophthora thermophilia
MVTTRLRSTAVKVVQSHLSPMLNSFLRSFRPVWQPLEFPTENITLVAPHQKIEEETIPDYLAARYYPVRIGDVIHNRYQVVGKLGYGTTSTVWLARDLSGRRHVALKLFILTSLLGEHLDDEINIYHRIADAATRGHPGRIAVRPLLDSFDVKGPDGQHRCLVHPPLWDSVLALLHRNPAQRLPTPVLAAVLKYLFRALDFLHTECHIVHTDIKADNIMFGIGATDPVFTTFEQHELNSPSPRKEVDGRFIYLTRELAVPQNLANPVLCDFGSAVLLDDGREHREDVQPDAYRAPEVILEAPWTYSIDIWNVGCMIWHVFEGGHLFSGRDPEHAAYRSRAHLAEMVALLGPPPPGLLARGNRSSQFFSSTGEFCAGIPLPAARSLEDRETTLRGEQEDRASFLRLMRKMLQWEPEKRSSAKELMEDEWLRCETAESACTQSIFARIKGLIDDTVRASRSPDGAGN

SEQ ID NO: 3918 - DNA, 4899 bp, Myceliophthora thermophilia
atgcaggaaccagaaatctttgagcagccggtggtcagcaaagatcccgaagcacaccccgtcggtgacgatcacggaacgtatggagggactgtctacagccacggagtagggacaacgactgccgcggatgatgatgcgagtgactaccgcgactttgtgtaccctgaagacaggaaacttgggacatggtcgaccgcgtttctgatcatcaaccgtgtggtcggggccgggatattttcgacaccgtcacgcatcatattctgcctcgatagtgtcggcgcggcgctgctcttttgggtcctgggtggggtgatgacgttctggcttttcgtctacctcgagtatggcaccgctctgccgcgatcaggtggcgagaaagtctatttggaacgtgtgtacaggaggcccaagtacctggccacatgcgttttcgcagtccagtttgtcctctttgccatctccacgggaaactgcatcagtttcagcagctaccttttgcgcgctgtcacacagaaaccacccgaagacgggagttggctgaacaggggaattgccgtcgccactattactgtggtctgccttatccacgcgtttgccccacgctggggcatctggctcagcaatggctttggcgccttcaagctcatcatgctcagcttgcttgtctgcacgggtttcgccgctctcgccggaagaacggtagccccgcgacccgacaacttctcaagtttccgtggagcgggctcttcgagaaggcccgacgaaggctctgacgctggcggagccgcggggggctactcgattgctctgctgcaagtgctctactcgtatagcggctgggagaatgctaattatgtccttaccgaagtcagaagcgcacccaggactctgaaaagagcagcgcccatatctgtctcggtcgttaccgcgctgtacctcctggctaacatttcctattttgccgcgatgagcaaggaggaaattgggaacgccggcgtcaccgtggcggcccagttcttcgagaatgtgtggggcaagagtgccttcgtggtcagagtgatgcctcttttcatcggcctgtccgctctcggaaacgcatttgcgcagtcttttgctatgccccgagtcaaacaggagctatccaaggagggtatcctaccgtggtctcgcttctgggccagcgactggccatttaacgcaccaaccggagcgatattcttgcattggattttcagcaccatcttcatcctcgggtccaatacgccggacgtctacgtcttcgtcaccaacatcttcatctattctggtaactacatcaaattattcctcgccttggggctcgtctatctcagctttgccccctccgagaggtgggccgagcagcgcacaaacttccgcagctcgccgctgctgacgatattctggatcgtggcgctcctgttcgtccaggcggcgcccttcatcgagaacgactttctccagaacgtgccgtactacgtgttccccacgcttggcaccagcctgctagtcatcggcacggcgtactggctcgtgtgggcaaaggtgctgccggcctttgggtaccggatccagcatgagattgtgcagatgccggacggcagcgagagggtcaaatacaagagggtcaaacccaagaagcggaagaagcgaaagcaggggcagtggactcgacaacggagacggtctcatgcttctgccctccccaccccactaccacgatcacgaccacgaccacgaccacgaccaccaccgccatcaccaccaccgccactaccgccaccaccgccgtccgatctcttgctcttccactccagtctagccgctccctccttgacgccgtcgcaaccaatgtcttgggacttgctgaagcggttcctcgagagcgatgtcttcaaccagaaccccttcctctcggtgtcgtatctctctcgctacgccgaccacataggcatccactatgtcctctgcaacaagcttcggcagttcccttacgaggacatcgagttcttcctcccacagctatgccacctcatcataagcgtcgacaacgagtcgatggctctggaggagttcctgctggacctgtgcgacgagtcggttaccgctgcgctgctgaccttctggctgttccagacgtacctacacgatctcgcggcgaatccccagaccgaggctttcaagacttgtcgccgggtgtacaacaaggtgcaacacattgtcttcggtctttccgagcacgcgcgcaacgagaggatcacggagaacgtcctgccggtgacggttctcgggagcttcgtcctcgcgagcgtcgcgtgccctttcctgccgcagtgggctggaccgttggccatcgcccaggcccggaaaccgcgcccccttgaggagacgatatcggaacccgtcatcgtggcaaacaagaatgcgccgacgcgcgcacataccgtcaccgccgggagtactcgctcaaggcgcgcaaaggaggggcgcagcgtgagtgcccaggaggtcaagacgcagaccagtccacgcagggcgtcgggcaaggccaagccggcgacaaaggcgtctcggccgccttcgagatcgaaaccgaccgagtcggcatcgcaggaacaggaggacgaggagcagctgtccagccgcctcgaggacctctccctggaagcccgcctcagctcggcctcgttgccccttccggattcccggccccgtctggtaacgagaccgacgacgccattgtcggccggcttacgtccctccgagcccacgtcatcgccgaagcggcactcgcaccacgtccggacgctcctgagccagtccgaattgacacgtgagcaaaagacgcggctgctccggcaaaactacttccgctgccagaccgcctttctatccgcgctcgaggacatctcgaaccgtctcgttgtggtcccgaaaccggcgcggcttagcgccctccgtgccgaactagctctcatcgcccgagacctcccggcagaggtggatattcccgtcatctgccctcccgacctggtggatggctccccatccaagagccgccaccacagaatcgtacggctcaacccggccgaggccacggtcctaaacagtgccgaaaaggtcccatacctgctgatggtcgagatactacgcgacgacctcacgttcgaccccgacaccccggacaaccagaggctgctcacgacgctgctgtccgaacatgggacgcggaaacgcatcttcgatctgtcggactcgccacgcgtagcgcccgcttctcgagcaccaccagagccggtcatcgatagcgtctttgagccggcgtctggcgacctcgggaactcgcccttgctcaagccttcggatgacgatgatgagctgttggggtcggcgccgactcagtccagcacgtcgctccgtcttggtggtacgggcggggcggcggctctggacaaggcagctgctccgcgcagctcgggcggctcatccgagtcgctcagcccgtccttcggcaggaggaggctgacgctcaacaagccgcggaacaactcggtcgatcagccggacttctcggcgctcgcggtacacatgcgcacggcttcgcagatgcttgcgcaactggacgccacgagcgggaagcgacctaagcaagaggtggcggcgatcagggcgcgcatcatcgcgagcatgcagagcctggaagagcaaagttttgatctggatgacgggcacgggccgacattcgacacgatcatggcgcgcgcccaggcggaggaggcggcggcggcggcggcggcgacgacggctggggggagaggcgagaccaacggaaccgagggcggcgacgacgcgacgacaaccgtcgagccgagtctcaatgccaacgccggcatcgacaggatggagaacgacatcaagacgggcggattgcagcggaagggcgaccgcgacgaccccagcgcggccgtgttcggcgaggcctgggaggcgaagaaggagcggatccgcaagtcgtcgccctacgggtggatgaagaactgggacctggtcagcgtcatcgtcaagacggggtccgacctccgccaggaagcgtttgcgtgccagctgatccgcgtctgccacaagatctggaaggacgcgggcgtgcccgtctgggtcaagctcatgcgcatcttggtcacgggcgagtcgtcgggcctgatcgagaccatcgccaacggcgtgtcgctgcactcgatcaagcgcagcctgacgctggcctcgatcgagtccgggcagaacccgcgccgccgcatcgccacgctcaaggaccacttcatcaaggcgtttggcctcccagagggcgaggcctaccgggccggcgtcgacgcgttcaagcgctcgctcgccgcctacagcgtcatctcgtacgtcctgcagctaaaggaccgccacaacgggaacgtgctcatcgacaacgaagggcacatcatccacatcgactttggcttcatgctgtccaactcgcccgggtcggtcgggttcgaggcggcgccgttcaagctgacgtacgagtatgtcgaagtgctgggcggcgtcgggtcgcccgactttgaggactacaagaagctctgcaagcaggggttccaggcagccctgcggcgatcggcagacaacatcatcgacctggtggccatgatggggcgcgactccaagatgccgtgcttcggcgccggtgtcgcgcaggtcacggcggcgctgaggcagcggttccaactgcagctgagcgccgacgaggcggagcagtttgtcgagactgatcttattgccaagtcacttggcagttattacacacgactttatgataccttccagtataggactcagggaatctactag

SEQ ID NO: 3919 - protein, 1632 aa, Myceliophthora thermophilia
MQEPEIFEQPVVSKDPEAHPVGDDHGTYGGTVYSHGVGTTTAADDDASDYRDFVYPEDRKLGTWSTAFLIINRVVGAGIFSTPSRIIFCLDSVGAALLFWVLGGVMTFWLFVYLEYGTALPRSGGEKVYLERVYRRPKYLATCVFAVQFVLFAISTGNCISFSSYLLRAVTQKPPEDGSWLNRGIAVATITVVCLIHAFAPRWGIWLSNGFGAFKLIMLSLLVCTGFAALAGRTVAPRPDNFSSFRGAGSSRRPDEGSDAGGAAGGYSIALLQVLYSYSGWENANYVLTEVRSAPRTLKRAAPISVSVVTALYLLANISYFAAMSKEEIGNAGVTVAAQFFENVWGKSAFVVRVMPLFIGLSALGNAFAQSFAMPRVKQELSKEGILPWSRFWASDWPFNAPTGAIFLHWIFSTIFILGSNTPDVYVFVTNIFIYSGNYIKLFLALGLVYLSFAPSERWAEQRTNFRSSPLLTIFWIVALLFVQAAPFIENDFLQNVPYYVFPTLGTSLLVIGTAYWLVWAKVLPAFGYRIQHEIVQMPDGSERVKYKRVKPKKRKKRKQGQWTRQRRRSHASALPTPLPRSRPRPRPRPPPPSPPPPLPPPPPSDLLLFHSSLAAPSLTPSQPMSWDLLKRFLESDVFNQNPFLSVSYLSRYADHIGIHYVLCNKLRQFPYEDIEFFLPQLCHLIISVDNESMALEEFLLDLCDESVTAALLTFWLFQTYLHDLAANPQTEAFKTCRRVYNKVQHIVFGLSEHARNERITENVLPVTVLGSFVLASVACPFLPQWAGPLAIAQARKPRPLEETISEPVIVANKNAPTRAHTVTAGSTRSRRAKEGRSVSAQEVKTQTSPRRASGKAKPATKASRPPSRSKPTESASQEQEDEEQLSSRLEDLSLEARLSSASLPLPDSRPRLVTRPTTPLSAGLRPSEPTSSPKRHSHHVRTLLSQSELTREQKTRLLRQNYFRCQTAFLSALEDISNRLVVVPKPARLSALRAELALIARDLPAEVDIPVICPPDLVDGSPSKSRHHRIVRLNPAEATVLNSAEKVPYLLMVEILRDDLTFDPDTPDNQRLLTTLLSEHGTRKRIFDLSDSPRVAPASRAPPEPVIDSVFEPASGDLGNSPLLKPSDDDDELLGSAPTQSSTSLRLGGTGGAAALDKAAAPRSSGGSSESLSPSFGRRRLTLNKPRNNSVDQPDFSALAVHMRTASQMLAQLDATSGKRPKQEVAAIRARIIASMQSLEEQSFDLDDGHGPTFDTIMARAQAEEAAAAAAATTAGGRGETNGTEGGDDATTTVEPSLNANAGIDRMENDIKTGGLQRKGDRDDPSAAVFGEAWEAKKERIRKSSPYGWMKNWDLVSVIVKTGSDLRQEAFACQLIRVCHKIWKDAGVPVWVKLMRILVTGESSGLIETIANGVSLHSIKRSLTLASIESGQNPRRRIATLKDHFIKAFGLPEGEAYRAGVDAFKRSLAAYSVISYVLQLKDRHNGNVLIDNEGHIIHIDFGFMLSNSPGSVGFEAAPFKLTYEYVEVLGGVGSPDFEDYKKLCKQGFQAALRRSADNIIDLVAMMGRDSKMPCFGAGVAQVTAALRQRFQLQLSADEAEQFVETDLIAKSLGSYYTRLYDTFQYRTQGIY

SEQ ID NO: 3920 - DNA, 2682 bp, Myceliophthora thermophilia
atgcagatgcccaagattaagagctttgcgccgggctggctcaacgagccttcttctcccggccacaagctcttcgagcagtgcacggatgatgcgacgactgctgcggcccttccatatggcaggagagcaaagccgggaccgcggcggaccatagcacggcgcggcaccgagatcttcgtggcggtcgggaaaacattacgatggggcgacctcgcctacctcaaggagtcgtgggagacaaagcacgcccggtccatccttggaactcgcatcaaaaaggagggttccgatgacccgtccgactacgacagcgcgattgccggacatgcaacagacggatatcgaaccatcaagacgcccgttgccgatgatattcgccagctggtcatgtccccgaatcaggacctcctggcagtcctgacgtctcatacggtccacatctgcatactgcccgactcctcccacctctacgcccgggacgccgcgccgttcaagcccaagttctggactctgggaccgacgacacacgtcacctcgcgttcggcagttgtctcggccttgtggcatccactcggagtcaatggaacggcacttgtcacggtcacagaggacgcggtggtgcgcgtctgggagctgtctacggcggaccgctggactttcgattcggccacgctcgcaatcgatctcaagaggctggctgatgggacgtcgttggaccaggactttagcgcctccgtctcggccacgaataaaggcttctcacccgatgcgttcgacatggaagtcgcggccgcatgcttccctgctaggggttccggaggctggtcgccgatgaccctgtggatagccatgaccgggggtgacgtgtatgccctgtgcccgcttctgccccagcgctgggccccccctcccacgctgatcccgtccttgtctgtctccattgtggctaaagtggcagccaccgaagacgaccccgatgcttcccccgaggcccggctcttggctcaacaacagcttgattggatgtccgacctggacaaccaggagcccaagattgtggaaggtgctcgcggcgaggtcgaggtcgaggtttatgcgcggcccacccgcccaggcgtgatcccgagactccagggcccgtttgagttcgacctgaatccggaggacgagcaggacgatgaggtggagctgaaggacatttacgttattggggaaaaggcacggctgacagatctgatgagcggcgaagaggaggagttggaggtggaaaatgatgaagggaccggcttgtccttgacagttgtctgcctcctttccaccagcgggcaagtcaagatctgtctggatgtggaaggagtcgaggcgcaatggctccccccaaagtccaagcagaggtcgaggccattcggcgctttcaccagcactcccaccttactaaccttccagacctttgacaccctcaagcctgtcgaggtcacgcctgatggttggcccatgtttagtgaggacgctacctctcggtacgcattctacatcacacacccggccgggattacctacgtttccctggcaccgtgggtgttcaggctcgagaacgaactggagggggattccgaggcaggggcggagttccgcattgacctgctggtcaaggggcaaggatcagagcgggagcgcatctacacgcaggctcgcggccagacctccctggcagcagctaccgcgatccgcgatcccgatcttgggcatttcgtcctctctgccacccatagcgacccagtcgccctcttcttcgatacgccggagcaggacattgtgccgagagagtctccgtccgcggtcctcgacaacgtggactttcctcagccagaagtcgcttgggaaccgcgtcctctcttccgcacgccggaagcattggagcacaagagcgcactgccggcgtggatagatcacctaaagacgggcaggcgacgcccgctgatgcaccaagagctgcgcctctcgatggcaacgctcgaggtgtttaccgaaggtcacaaggttctcgccagcgaagtggacagcatcaacgatgccgtcgcgcagttgttcaggaagtgccagacgctccaggaggaactgaggaagcagatcgccaaggcaaacgaggccaagcagaaggtggatgtgatcacgggcgaggactctgcagacgacgagtcctcagcggtctcgcaagacgaactcgcgcgggaccggcttcggcaagttcgagagcggcaggaggaactggcgagcaggatggacaagctgaagcggcagctcggcaggctgacgagccgcgagctcagcgacaaggagaaggcatggggggaggaagtccgggcgctcgagagcagcgtctttggccccgaggcagatcaggcggcggcgggggcggcgactcccaagaccaaacagccctggaaacggttcgaagaagtcaaatccctgcgggacgccttgtttgcgcaggctgaagagctgcaccgttctcgggagggaacgggcaacgacggtcccgcgtcgccggcgcctggtttgcggatcccggccgaggtgcgcaggcaaaagatggcgcaggtcatgggtctactggatcgggagtctgcactggtggaggcagtcaaggcccgtattgagagattaagtgttggatag

SEQ ID NO: 3921 - protein, 893 aa, Myceliophthora thermophilia
MQMPKIKSFAPGWLNEPSSPGHKLFEQCTDDATTAAALPYGRRAKPGPRRTIARRGTEIFVAVGKTLRWGDLAYLKESWETKHARSILGTRIKKEGSDDPSDYDSAIAGHATDGYRTIKTPVADDIRQLVMSPNQDLLAVLTSHTVHICILPDSSHLYARDAAPFKPKFWTLGPTTHVTSRSAVVSALWHPLGVNGTALVTVTEDAVVRVWELSTADRWTFDSATLAIDLKRLADGTSLDQDFSASVSATNKGFSPDAFDMEVAAACFPARGSGGWSPMTLWIAMTGGDVYALCPLLPQRWAPPPTLIPSLSVSIVAKVAATEDDPDASPEARLLAQQQLDWMSDLDNQEPKIVEGARGEVEVEVYARPTRPGVIPRLQGPFEFDLNPEDEQDDEVELKDIYVIGEKARLTDLMSGEEEELEVENDEGTGLSLTVVCLLSTSGQVKICLDVEGVEAQWLPPKSKQRSRPFGAFTSTPTLLTFQTFDTLKPVEVTPDGWPMFSEDATSRYAFYITHPAGITYVSLAPWVFRLENELEGDSEAGAEFRIDLLVKGQGSERERIYTQARGQTSLAAATAIRDPDLGHFVLSATHSDPVALFFDTPEQDIVPRESPSAVLDNVDFPQPEVAWEPRPLFRTPEALEHKSALPAWIDHLKTGRRRPLMHQELRLSMATLEVFTEGHKVLASEVDSINDAVAQLFRKCQTLQEELRKQIAKANEAKQKVDVITGEDSADDESSAVSQDELARDRLRQVRERQEELASRMDKLKRQLGRLTSRELSDKEKAWGEEVRALESSVFGPEADQAAAGAATPKTKQPWKRFEEVKSLRDALFAQAEELHRSREGTGNDGPASPAPGLRIPAEVRRQKMAQVMGLLDRESALVEAVKARIERLSVG

SEQ ID NO: 3922 - DNA, 4212 bp, Myceliophthora thermophilia
atgggggaattgagcatggcaggcgaagccaccctcgtgcgagccgtacgcgcactcgaccatggcgacgccgaaacgattccggatcggctagaaagggtgtgggatatcctcgaagactatcggggcggcaatttccacgccgctgaggaaatgctgctgcgatggctcctcaagaacatgacaggatcctcctcgactgccgaacgattgcgacgatatccccgggtttggcacatcttggccgccgttttcaccctgattccgctcttctccctggcaaaatcattagccgaccgtcgcttcgtcggtctcctgcaacagacgctcaaggatattgctgctccggagcaggagcagacggacgttaatggacacggccccgactcggacgtcgacatggccgatgctccctctcccggcagtcctgcaaacccccgcaaacggaagagaccagacacagtaggcttccatgccgcgagccagagacgactgtccggctgtctgcataccgccgaggcggtcttcgacgccgtccggatcctgctctctcggtgcgaactccagtctctagacgggccggccacgcaccggatgggtgccgaacatgtcaagtctctgttctcgacgtctgcggccgacgccatgagcattttggtcccatggttgaccatgtgcggcctcgctgtggacgggccagacccggtccagctgcgggagcaatcctcgtggctctcgaccttcgccgccctgtgggagctccgccttcagagcgctgctgatgcctccgaggttgcaacacatctttccggaacggctgcccgaattctcggaaaattggcgaggcacgcaggtcagacgccgctgggagttgatgcgatcatccgggagcggtggacccgagacctccgccgcttcttgacgcggaacctgattctgccggctagggcaatcttcttgaacaagagaagccaagagattgtgaaggttgctgtggacatgtcgagcccatcggcgcaattcagctttcccgtgttgtttgacctggttagcaactctccgctagaacacggcgctaagacgtcaaaaaaggatcacgaaacatgggtacaaactgtgttcgatgcgattctgcatgctgcgaggaatgtcaaccctgaaaaccggacagcagctgtcaggtcagtcatggaacttgcggcggagcgaggcacagcgttatcgatctcaagcctccgtgctgtgtgcaatgactatgccctccgcaaggacgagcacgactggagtctgctgcttgccgccatcaagctcaacccggacgttttcctgattgccgacgaaggcaagcggctcctcgagcgcgttctagaaagaacgaaggaaccatattctgtagcggccggagactgggagaaggcagcgcggttcatcgttctgcttgcagacgggtatgcccaagcacgcgacctgtccacctttgtcagagtttggctcgaccatcttgcccctaccaagcccgggggtgtcattcagccactttgggcgcaagacgagcttgcggagaccgtcgcaagactggtccagccatctctgacctcagctcagttggtcgacatcatagaatggctcgcgtctcggacattgcaaaacgaaacttgggcaaagatccatattctcgaagccctttcaaacggtatctcacaggaagactttatcgatgctgtaaacatcaagatctttgaggctgctttcgcggagaagtcttccaagtcggagaacccatccatctctgcattgcggtggacggtggcttcgaaggccgttgccaggggaacttcacaggaagctgatcacgtttggtctcagatcaagtccgatcttaagaataccctccaaaaaggtcatgtggacatggtcaacaccttcactgctttcaaatgttgcgtcgctgtctggttggcaaaccatcctagtgggccacacgaggacgacacagctagtatgatctgctgctttgttgagcggatacagaaaactagcgagcccacaaagctgagctccgacggctccaaagccccaattaccaaaggggcgtatttccgttggattctttccgatgcgccccgcgttttgagcctacttgtagaaaggagtggaggcattccgagcggaatactgtctctcttcacatccctggaagtcggaggcgtggatcttgtggattcggctttggaagcctctcgcctgttgctcgaacgtgagagcagtgtgaaccgacataaaatcatggactcgctgttaaataccataatctccatgattgatacgtctaagacaggcagattggggccttcgaccaaggttgctgtccagttcctcctcggcgtcccgatcgagattctgagtaggacacaaagggaggcggccatgaaggcgcttgtctctcatctgccaagagagtcggacaaggcagaagccatcgggacagagtactggaagccagtgcttagtctcatggttaagctgatggggcgtccgaccttctacgagggcatgagcttctctcatctagagtcaataggacgctgtttgtcgaaagtccacaagcgctcgaaccggcggtctagggataagcttcctgttgatgacggattaggagatcggggtaacttcaggcttctgcaacaactgactgtgctggctattcggcaaatgacaagcgggaaccctggagagcgggaaaaggcgtatctcagagaagccatctcgcttcttcagagccaatgtgatgattcagatgccgcagcacgcatcgttcttctccaagccttcatctcgactgtgcaaagctcgccggctatcaggaaacttgaagaggatggtctaaatttcaacgatctcaacagtcgacttgtacagcttgcgtcgtcaacgatcgcatcgggaaagcgaagtggaaaggggctattagttctcctcctcgccctcggagcactcagcgacttggaccgtgaggccgtcagatcggcgttctctgactcggtcccttcgctgctagaggctagtaactcgctccttgaggccggatcgcgggccggctgggaactgcgcacgttcgtggcaaaccatttccctgaggtactcgaatcaccactggaactcaaaatgcccgttgagcagtcgtcgccccaaggcgaaggcgaggaatccgaaaacgtcgagtctgccgcaactcttgacaagacagcgctattgcagtatcttgatgctgtggttcgatctgccgacgaagatgcaaaacttgggtacctcaaagagctgctccttaggctcggtgaaggccaagacatgatcggtcgccagttggtcgtttaccggctgatccaacatctcaaaggttcgcggccatccgactcccctgaccggttcgacctcgcccaagcccacagtatgctttgcgatcgcctcctgcagacgtcaaccccacccagcttctacctgacggcgagagccatccgtctcatcctcgaccagaaccctgcgtgcatgacccagtggaacattgagctcaccctcagcaccgtatccgccatatccgctcggccctcgacccaggccctcctgtccgaatcgccaggcatcatctacccggccctctgccgcctcgtcgagatggtgatccggcgccatcgcaaacgcctcgacggacacttccacatcctcctcattgccctgcagtccctcctccgcctgctcctgtcccagccggacgcggacgccgactctcggcagcagcaacaacaacagccacacgggagcggcgggaaacagtggaaagaaaagcaggccaagctcttcgcccgcctgcttacccttatatgcgaaccgaccgcggcctcggtcacgcgctcgcagcaggccaatacggcggcggcgggcgccggcccgctcgagtcggagcgcgacaaggcgaagcggtatgcgggccagttcatgtacctggtactgatgcagtacgtcaagctgcagctcgagtatgtggtgccgctcggggtgcgggaggcgctggagccgggcgtgtacgccataatgggcatcaccacgcccgacgtgttgcgcatcatgaacgacgggttggatccgggtgggagggtggtgttcaaggagatgtacaagatgtaccagcgatttgggaagtggagtggtgtctga

SEQ ID NO: 3923 - protein, 1403 aa, Myceliophthora thermophilia
MGELSMAGEATLVRAVRALDHGDAETIPDRLERVWDILEDYRGGNFHAAEEMLLRWLLKNMTGSSSTAERLRRYPRVWHILAAVFTLIPLFSLAKSLADRRFVGLLQQTLKDIAAPEQEQTDVNGHGPDSDVDMADAPSPGSPANPRKRKRPDTVGFHAASQRRLSGCLHTAEAVFDAVRILLSRCELQSLDGPATHRMGAEHVKSLFSTSAADAMSILVPWLTMCGLAVDGPDPVQLREQSSWLSTFAALWELRLQSAADASEVATHLSGTAARILGKLARHAGQTPLGVDAIIRERWTRDLRRFLTRNLILPARAIFLNKRSQEIVKVAVDMSSPSAQFSFPVLFDLVSNSPLEHGAKTSKKDHETWVQTVFDAILHAARNVNPENRTAAVRSVMELAAERGTALSISSLRAVCNDYALRKDEHDWSLLLAAIKLNPDVFLIADEGKRLLERVLERTKEPYSVAAGDWEKAARFIVLLADGYAQARDLSTFVRVWLDHLAPTKPGGVIQPLWAQDELAETVARLVQPSLTSAQLVDIIEWLASRTLQNETWAKIHILEALSNGISQEDFIDAVNIKIFEAAFAEKSSKSENPSISALRWTVASKAVARGTSQEADHVWSQIKSDLKNTLQKGHVDMVNTFTAFKCCVAVWLANHPSGPHEDDTASMICCFVERIQKTSEPTKLSSDGSKAPITKGAYFRWILSDAPRVLSLLVERSGGIPSGILSLFTSLEVGGVDLVDSALEASRLLLERESSVNRHKIMDSLLNTIISMIDTSKTGRLGPSTKVAVQFLLGVPIEILSRTQREAAMKALVSHLPRESDKAEAIGTEYWKPVLSLMVKLMGRPTFYEGMSFSHLESIGRCLSKVHKRSNRRSRDKLPVDDGLGDRGNFRLLQQLTVLAIRQMTSGNPGEREKAYLREAISLLQSQCDDSDAAARIVLLQAFISTVQSSPAIRKLEEDGLNFNDLNSRLVQLASSTIASGKRSGKGLLVLLLALGALSDLDREAVRSAFSDSVPSLLEASNSLLEAGSRAGWELRTFVANHFPEVLESPLELKMPVEQSSPQGEGEESENVESAATLDKTALLQYLDAVVRSADEDAKLGYLKELLLRLGEGQDMIGRQLVVYRLIQHLKGSRPSDSPDRFDLAQAHSMLCDRLLQTSTPPSFYLTARAIRLILDQNPACMTQWNIELTLSTVSAISARPSTQALLSESPGIIYPALCRLVEMVIRRHRKRLDGHFHILLIALQSLLRLLLSQPDADADSRQQQQQQPHGSGGKQWKEKQAKLFARLLTLICEPTAASVTRSQQANTAAAGAGPLESERDKAKRYAGQFMYLVLMQYVKLQLEYVVPLGVREALEPGVYAIMGITTPDVLRIMNDGLDPGGRVVFKEMYKMYQRFGKWSGV

SEQ ID NO: 3924 - DNA, 1584 bp, Myceliophthora thermophilia
atggctgtttcgcctgctcctcacgacaggccgtcgtcttacggctctgacctccctcccccgacttcgacttcgcccagcgctcagaggacaggagccgcccctccacctcctccaccagcatctgcagccgccgcgaacaacgcatctgcaccaccaacgcgatccagcagcggcagccctaagggttcgactgctagtgctgctgctggtgctgccactcctggtgcagctaccacgcagagatcctctccgcccagcgcgtctcgaaatgccagcggacccaaaattgtcgttaagaaggagcccagctcgcccggcttgcaagccgccaggcaccggcctaggaagctggacctctccaagaacaccagcatcgtgtctcccgccacgggtcggcccatgaccgcacgagatggcctggcgattcaagaagtcggcctcgcctgtctctcgcccggtttcgtacccaaagatgcggccgagcaagaacagctaaaccgcagcatgaccgtcagggagcatcaaagacagatcatcgaggcaagactccaacaacaatcggcgaagatgggggacaactccgataaggacaaggagtcgagtcattttgccgcgaagacgccaggcctcgcccgcaagcgcggcccgcctccgggcctaagcatcgttgctccatcgcacgaacagttcgccaatgagagggtcatccagtcggcgcctctgggccagacgttcacggggagacacaatccacacccgctgacgcggcacgtcaccaaccagccctccaacctcgccagcatgtcgcacatccaccacgtacctgccaatcagaccaacaaccgcctcccaccaattgccgacgttttcggccagaatctctcgggccaccccgagtctagcggccacgcgctcttcgccggtcagaaccgtgcgccactaccttccccacaccatcccccggcccagccgcagcccgctcgcacgcgcgagtacaagtcggcagaagaagcgcaggtcgagctggccggcggccggcctgagctcctaccaaagttagtacgctacggcggccaccagcccccgacgccgccgtcccccccgaacactcaggcatcccgggactacccgcacagccagcacaatgtcaatactgcccacaatgcaccatccaatcatcaccatcataaccaccagagccatcacagactctccccaaatcttgctgacccctccctccccacaaccagtagccgaaccctaagcaacaaccaccaagccccgcctcccgggtctggcccaagcggcagtggcacaaaccccatgaagcgcagacgtgccgagtatgaagagggcggcagcccgccgcttggtaacggcggacgcccggccccggccgctccacatccgccgcagccgcagcaacagcagcagcagtccatgccgcttccgtttggtgccgcgtcagccccgaggagggccttctttggcgagggacgggacagccccgagactctcgaggcgaagaaggaggagtttttgagcttatgtgcgagggcctgggatctgcttcattcttga

SEQ ID NO: 3925 - protein, 527 aa, Myceliophthora thermophilia
MAVSPAPHDRPSSYGSDLPPPTSTSPSAQRTGAAPPPPPPASAAAANNASAPPTRSSSGSPKGSTASAAAGAATPGAATTQRSSPPSASRNASGPKIVVKKEPSSPGLQAARHRPRKLDLSKNTSIVSPATGRPMTARDGLAIQEVGLACLSPGFVPKDAAEQEQLNRSMTVREHQRQIIEARLQQQSAKMGDNSDKDKESSHFAAKTPGLARKRGPPPGLSIVAPSHEQFANERVIQSAPLGQTFTGRHNPHPLTRHVTNQPSNLASMSHIHHVPANQTNNRLPPIADVFGQNLSGHPESSGHALFAGQNRAPLPSPHHPPAQPQPARTREYKSAEEAQVELAGGRPELLPKLVRYGGHQPPTPPSPPNTQASRDYPHSQHNVNTAHNAPSNHHHHNHQSHHRLSPNLADPSLPTTSSRTLSNNHQAPPPGSGPSGSGTNPMKRRRAEYEEGGSPPLGNGGRPAPAAPHPPQPQQQQQQSMPLPFGAASAPRRAFFGEGRDSPETLEAKKEEFLSLCARAWDLLHS

SEQ ID NO: 3926 - DNA, 1194 bp, Myceliophthora thermophilia
atgcagcgaactgcaggcattggccatcaccaccgcgacaaacccaccagggccgagctgcgacacacggcacgaatcgcgtatgcaggagctactgtagtatgtacgctacatcctacgtacgaagtgcttgcacgccgctccggcctgcccagcgcagcggcggcacagatatggcaggccttcacctgggggctgactgcttcaattggcgccccgactgaccaacgaaacatgcgcgccattctcccctcccctccctttccccgtcccttttcgacttcctccaccctttccacccttgctgcagagtgcattgcatcgttacgcaacacagcaaagcatatgcgggctataccaggtggtgtaagatgtcaaggagtcggcagctctcgagacatgccaggcggtttttgccgtgcaacagcaactggtcaccgccggatcagctctcagctcgagacgggaaacgagttgggagcacaccaatgctcccgtcctcaggactcgtcccaactgccggccgccgcccggtttggcgcttttttttcttttccccagttcgacatgttcgacggattcaacacccgttcttggcggtgtcttggaaacgactcaactctcggaatctccaccagcgccgggtgccgttctcccgcggtgccgttgtgccgttgtgccctctgggccaagccaccagagaccaccgccaggcatgaccacggccggctgtttcaccgcagcttcggcccgcggcctgcgaagtattcgttcctcccaaggccgccaagtgccatgcagtcacgactcgcgacaaaggtggtggaccggattccgaaccgcaggctcactcatgacaactggctttgtccagccaagacttcaccttgttcagaacggccggacggcaggttgcggtgtggcaaacaccgggacgcccagatccccgtcttccggcctcgcttccaagggcacacaagttgtggttgttgtggtgtgtatgtatgcatggatgttatgtactcctgtgagccgtacaccttacaacacagtacaggacacactacagagccggcgaggatattgtccgatatcatccacacgtggccgaggtattcgtcgaaattcggcgacaaccccggcgaatattgtcttgcagatccgcggctcgcctgcaacggcagcagactttag

SEQ ID NO: 3927 - protein, 397 aa, Myceliophthora thermophilia
MQRTAGIGHHHRDKPTRAELRHTARIAYAGATVVCTLHPTYEVLARRSGLPSAAAAQIWQAFTWGLTASIGAPTDQRNMRAILPSPPFPRPFSTSSTLSTLAAECIASLRNTAKHMRAIPGGVRCQGVGSSRDMPGGFCRATATGHRRISSQLETGNELGAHQCSRPQDSSQLPAAARFGAFFSFPQFDMFDGFNTRSWRCLGNDSTLGISTSAGCRSPAVPLCRCALWAKPPETTARHDHGRLFHRSFGPRPAKYSFLPRPPSAMQSRLATKVVDRIPNRRLTHDNWLCPAKTSPCSERPDGRLRCGKHRDAQIPVFRPRFQGHTSCGCCGVYVCMDVMYSCEPYTLQHSTGHTTEPARILSDIIHTWPRYSSKFGDNPGEYCLADPRLACNGSRL

SEQ ID NO: 3928 - DNA, 2211 bp, Myceliophthora thermophilia
atggccagtgcagaaagtcacgaagctcaaatcgagaagactacggcaatcgacctgccgctgcgctcgcgcccggtcgacggggacgcaatggctccggccgtccaaccgccggcgactccggccttggtctctccgggaatccgggtcgagctgtacggcgatgctcaggcgaagtcaaagcccgcgccgatacagcctcaatccgcacctccggatgtccagagtttcccgagccccatgaggcatcatcggaggaccccttcggcccatcgcgagatcaaggaaacgctcaatgcacgatccgagtattacaacgaggactcggagggccgctcacaccaccaaatcaatcagtacatcatcaaggatgagataggccgtggctcatacggctccgttcactcggccgtcgaccagtttgggaacgaatatgccatcaaggcgttctccaaggcacgactcaggaaacgggcccagtcaaacatcctccgccagggcccgcggcagcctggccgcttccaccgagccggattcggcgctcctgatgaccccatcatgggctacaaggcccagcgagccaaggaggccaaggatgccctctacctgattcgcgaagagattgccatcatgaagaagctgaatcatcccaaccttgttcagctgattgaggtcctggatgatcccgaggatgatagcctctacatggtattggaaatgtgcaaaaagggcgtcgtcatgcacgtcggcctcggcgaatctgcgacgccctacgacgaagagcaatgccggtactggttccgcgacctgatcctcggtatcgagtacctgcactctcagggagtcgtccaccgtgacatcaagcctgataacctattgctcaccgaagatgacgtcctgaagattgtcgatttcggtgtgtccgagatgttcgagaaacccgacaacatgaggacggccaagtccgctggctcgcccgcctttctccctccggagctgtgtgtggcgaagcatggcgacgtctcgggcaaagctgccgacatctggtccatgggcgtctccttgtattgtctccgctacggaaggatacccttcgaacgtgaaggcgtgctggatatctacgaggcaatcaggaccgagactccgaaattgccccctgacgagaatccggattttgttgacttgatggggcgtgtgctagaaaaggacccggagaagaggataacgatggctgagctcagggaacacccgtgggtaacgaaagggggtacagatccgctactgagcgccgaagaaaactgctccgaaccggttgatccgcccaaccttctcgaagtgaaccacgccttcacccgacggatgagccacctgatctgtgttatgaaagcaatccgcaagttcaagagcctcctgtcccgccgtcgagctgcccgccaacaggacgcccaccaggacctcggcagcaacgcaggctcttcctcacctcggccggacgagaaagcccacgatcgacaatccacggccgagtttgccgcccgcgtcctgcgagagcgccaggaattcctcgcaaaaggcggcagagccagccttgaccaactcctccgccagtcctcctcctcctcctcgacccttatcgccacccgcaccagcgagtccgagacccaagactcgcaagggcaacccccgtcaccgccgccctttctagggattggcacaggcggcattgacgccttccccaacgcaatcgacgacccgcggcatcccttggctgtcgggaatggtgaaggcgcgccagttgaggcggtcgtctcggattcgccgacggtcgtggacttcaacgtgtacgaccgggcgtttgaggccgaggtggagcggatcaagagatcgggcagcagacgcgccggtgccggcgctcgcgggtcgaggggacaggggaggccgacgggcggtgctggtgcagcagggcaaccggccgtgatatatcagacgaggctgagcgagcgccgcggcggtggagatgcgggtcttgagggtgggcaggagcggctgctgcagcagctcaccggggggggttcgaggttcgcggatgtggtggcgagggctatggccgcggaggtggcgaaggagaggtcggagaagagcgagggttctgcggagggccagcctcatgcgggaggtgaagtgaatccccaaggcctagagcgccagtga

SEQ ID NO: 3929 - protein, 736 aa, Myceliophthora thermophilia
MASAESHEAQIEKTTAIDLPLRSRPVDGDAMAPAVQPPATPALVSPGIRVELYGDAQAKSKPAPIQPQSAPPDVQSFPSPMRHHRRTPSAHREIKETLNARSEYYNEDSEGRSHHQINQYIIKDEIGRGSYGSVHSAVDQFGNEYAIKAFSKARLRKRAQSNILRQGPRQPGRFHRAGFGAPDDPIMGYKAQRAKEAKDALYLIREEIAIMKKLNHPNLVQLIEVLDDPEDDSLYMVLEMCKKGVVMHVGLGESATPYDEEQCRYWFRDLILGIEYLHSQGVVHRDIKPDNLLLTEDDVLKIVDFGVSEMFEKPDNMRTAKSAGSPAFLPPELCVAKHGDVSGKAADIWSMGVSLYCLRYGRIPFEREGVLDIYEAIRTETPKLPPDENPDFVDLMGRVLEKDPEKRITMAELREHPWVTKGGTDPLLSAEENCSEPVDPPNLLEVNHAFTRRMSHLICVMKAIRKFKSLLSRRRAARQQDAHQDLGSNAGSSSPRPDEKAHDRQSTAEFAARVLRERQEFLAKGGRASLDQLLRQSSSSSSTLIATRTSESETQDSQGQPPSPPPFLGIGTGGIDAFPNAIDDPRHPLAVGNGEGAPVEAVVSDSPTVVDFNVYDRAFEAEVERIKRSGSRRAGAGARGSRGQGRPTGGAGAAGQPAVIYQTRLSERRGGGDAGLEGGQERLLQQLTGGGSRFADVVARAMAAEVAKERSEKSEGSAEGQPHAGGEVNPQGLERQ

SEQ ID NO: 3930 - DNA, 783 bp, Myceliophthora thermophilia
atggaccaacgcggcgcgcctgagttcattcttgaagcctttgcagaccccagctcggtgcgcgatgtcgtccgcggtatcctacataccattttcttcctccgctacttctccgccgtcctcccgcaaacccgcgacgtccttgggctcgagctgccctacgtccccgaagccgagatcgagaccctcatcgaccagcgcgtggccgccctcgtgcgccagctcgaagctgagcgccaccaatctcacactttgcccgagagccgcggcggctttggacttggcctgctagtaggcggaggaggaggaggaggaggaggaggaggggcccctctctctagcggcggcggcggcggccggggtcagatcacgattcaatttctcgaaaagcgccggcgcaagacatggtacgccatgcgcggcgatgacgaggtgccctgggagagctggacggtcaaagtgacagtggccgacccgcgaacagaaggggaacgagccaaggtccgccgagcgtccgagacgaccctgcacaacacaatcatgaagaccgtcaccctcgccaacgcgcacaaggaccatatcccccccatcaccacctccgactcgaacccgttcccctaccagatccacgtcggtggcgtgcagagcagcagccaccagcagcgctcgcagcagcagcagcagcagcagcaacaacatcaacaacaattacaacaccgccaacagcagcagaagaagggagccgccgttgcggggtgggctacgcgcatgggcatctattag

SEQ ID NO: 3931 - protein, 260 aa, Myceliophthora thermophilia
MDQRGAPEFILEAFADPSSVRDVVRGILHTIFFLRYFSAVLPQTRDVLGLELPYVPEAEIETLIDQRVAALVRQLEAERHQSHTLPESRGGFGLGLLVGGGGGGGGGGGAPLSSGGGGGRGQITIQFLEKRRRKTWYAMRGDDEVPWESWTVKVTVADPRTEGERAKVRRASETTLHNTIMKTVTLANAHKDHIPPITTSDSNPFPYQIHVGGVQSSSHQQRSQQQQQQQQQHQQQLQHRQQQQKKGAAVAGWATRMGIY

SEQ ID NO: 3932 - DNA, 963 bp, Myceliophthora thermophilia
atggcgcccggcgtaggaggctaccgccagatcaacaaggcgctcaacatttgcgccttcgaagactatctcgagggacagctgatgcgccttcctcagctactggacgtggagcagattagcccgcgagtcatccgggtacttggacaaaatcctggaaagttcacgctccaagggacaaacacgtatatcgtgggcacaggggctgagcgccttatcattgacaccggccaggggatcccagactgggcagacctgatctcccagaccctgtcaaacgaaggcttctcgctctcgcacgtgctgctcacccactggcatggcgaccatacggggggcgtgccggacctgatccgcctatacccgcacctccgcaccgccatctacaagcacacgcccagcaaggtccagcagcccatcgtcgacggccaaatcttcaaggtcgagggcgccaccgtccgcgcggtgcatgccccgggccactcgcacgaccacatgtgcttcatcctcgaggaggagaatgccatgttcacgggcgacaacgtgctgggtcacggcaccgccgccgtagagcacctgcgcacctggatggatacgctgcggcagatgcagtctcacggctgcgccaagggctacccggcccacggcgccgtcatcagcgacctcgaggcaaagatcgacggcgagctcgcgtccaagttccggcgggagcaccaggtcttgcaggccctgcagtccgcttccaataatgctgaaggaggaggaggccgcggcggcaaggccaggctcacggtcaaggaggtcgtctcggccgtgtatggagacaagatggacgatggcgtgaggcaaatggcgctggagcccttcctgcaggaggtcctctctaagctggccgaggatggcaaggtaggattcgagatgaagggcggcgtcaagaagtggtttattctcagatcgccttga

SEQ ID NO: 3933 - protein, 320 aa, Myceliophthora thermophilia
MAPGVGGYRQINKALNICAFEDYLEGQLMRLPQLLDVEQISPRVIRVLGQNPGKFTLQGTNTYIVGTGAERLIIDTGQGIPDWADLISQTLSNEGFSLSHVLLTHWHGDHTGGVPDLIRLYPHLRTAIYKHTPSKVQQPIVDGQIFKVEGATVRAVHAPGHSHDHMCFILEEENAMFTGDNVLGHGTAAVEHLRTWMDTLRQMQSHGCAKGYPAHGAVISDLEAKIDGELASKFRREHQVLQALQSASNNAEGGGGRGGKARLTVKEVVSAVYGDKMDDGVRQMALEPFLQEVLSKLAEDGKVGFEMKGGVKKWFILRSP

SEQ ID NO: 3934 - DNA, 2538 bp, Myceliophthora thermophilia
atgtcgacgcagaatagtatttactcgagcgggcagttcatgaaccccggccccgcgccgcggccccctacggacaagccccgcctgggtctcatgcccaacgtgaacctcacgaacagcatgtcgaacatgagcatctcctctccagtatcaagcacctacagcgggtctaccatagccctcccaatttcgaggcaaggatccaacaatttggatggttccggaggagtcgccatcgtcaagcaaggctatgtcggtctcccgagcaagaatccgtttcaacaatggaagagccgataccttatcctacgccaggacaacctggacttccacaagaacgagaacggcaagtggctgtacaagatccagctttcggacgtggttagcgtcgaccgggtacctgacgacaatggtgaccccgtctttgagctcaggaggaacgtgaccaatgcgtaccctggccctcccggagatgacgacggcaacggcgtgcgatctctgcgcatttgcgtcaagaccgacgatgagctatacgagtggattgactgtatctacgcccgctgcccaggcggtgtcagcaatccctccaacttctcgcacgccgtgcatgtcggcttcaaccctcagacgggacagttcactgggctgccggaggagtggaccaggctgctcaattcgtccgccatcaccaaggaagacgtggagaagaatccccaggccgtctttgaagttttggatttctattccgacatgacgaagcgcgccgagaatcccgatcattacggcaatgctcccatgcccatcgcgtctccaaactccatgcagagcgaccagtatggctatccgagcggcaactcggtcgcgccgccgcggcagccgaaacctatacagcgcagcccggcatcttactcgacaacgccctcgccccagcccgtcactactccatcgcctaggccggcagattaccaaaagcagcagctgcaaggggtgtcgcccaactacatctcggccgaccggatgcgggaagagcagcgtgcgcgggaactcgagaagcagcgtgcagagagagaggagcaggctcgccgggagctcgaggcgtacaacgcgtcgcttcccaagacgaaagtccctcttgcccagcaagagattggtggcggcttttcgagtccttcgccccaacccgaccggtacaacccgacacgagccgcgcccaaggcgccccaaggccagtcgctcagggcacaaagacctgcgccagctcctccgagcaactcttccgctcaatcccgacctcctctttcgcagcagcaatccagctctacctcggcccgtgaccccgcagctcaagcgcagaggacgcctcgaccggaccagaacaacggtcctccagcggctgcccgttatcccaacggagcgcaggcaaggggtcccaacggccaacctcaggcgcagcagccgtcgcgcatgccggcgcccgtgaagcccctgaatgtttcgaagcccgcgcccagctcggccaactcggatgccgtcaaggctgctgaggctgccctgactgctaagcctcctccttcggagcgcaagcaggacgtgcgcatgtcgaccatgtcggagaacgaggtgatggcgaagctgagggaggtcgtgtccagggacgaccccaacaggctatatgctaagcaaaagaagatcggccaaggcgcgtccggctccgtgtacgtggccaaggtcatgggccaaagacccggcgtcccggtgaacccaaagactcgcagcaccagcgatcgtgtcgccatcaagcagatggaccttgctcaccaaccccgcaaggagctgattgttaatgagattctggtcatgcgggagaacaagcaccccaacatcgtcaacttcctcgacgccttccttatggacaacgacaaggagctctgggtcgtcatggaatacatggaaggtggtgccctgacggatgttatcgagaacaaccccgtcatcacggaggagcaaatctcgaccatctgccttgagacctgccaaggcctcgagcatctgcactcgcagaacatcatccaccgtgacatcaagagcgacaacgtcctcctggacgcccgcggaaacgtcaagattaccgactttggcttctgtgccaagctgaccgagagcaaatcgaagcgggctaccatggtcggcaccccctactggatggcgcccgaggtggtgaagcagaaggagtacgggcccaaggtcgacatctggtcgctcggaatcatggccatcgagatgatcgagtcggagccgccctatctcaacgaagagcccctcaaggcgctgtatctcatcgccactaacggcacgccgcggctcaagaagcccgagaagctgagcaaggagctgaaggccttcctgtcggtctgcttgtgcgtcgacgtcaagagccgcgcctcggcacaggagctgctcaatcacgaattcttgaagcacgggtgcccgctggcgagcctggcggatctgttggctttcaagagggtcgccaaatag

SEQ ID NO: 3935 - protein, 845 aa, Myceliophthora thermophilia
MSTQNSIYSSGQFMNPGPAPRPPTDKPRLGLMPNVNLTNSMSNMSISSPVSSTYSGSTIALPISRQGSNNLDGSGGVAIVKQGYVGLPSKNPFQQWKSRYLILRQDNLDFHKNENGKWLYKIQLSDVVSVDRVPDDNGDPVFELRRNVTNAYPGPPGDDDGNGVRSLRICVKTDDELYEWIDCIYARCPGGVSNPSNFSHAVHVGFNPQTGQFTGLPEEWTRLLNSSAITKEDVEKNPQAVFEVLDFYSDMTKRAENPDHYGNAPMPIASPNSMQSDQYGYPSGNSVAPPRQPKPIQRSPASYSTTPSPQPVTTPSPRPADYQKQQLQGVSPNYISADRMREEQRARELEKQRAEREEQARRELEAYNASLPKTKVPLAQQEIGGGFSSPSPQPDRYNPTRAAPKAPQGQSLRAQRPAPAPPSNSSAQSRPPLSQQQSSSTSARDPAAQAQRTPRPDQNNGPPAAARYPNGAQARGPNGQPQAQQPSRMPAPVKPLNVSKPAPSSANSDAVKAAEAALTAKPPPSERKQDVRMSTMSENEVMAKLREVVSRDDPNRLYAKQKKIGQGASGSVYVAKVMGQRPGVPVNPKTRSTSDRVAIKQMDLAHQPRKELIVNEILVMRENKHPNIVNFLDAFLMDNDKELWVVMEYMEGGALTDVIENNPVITEEQISTICLETCQGLEHLHSQNIIHRDIKSDNVLLDARGNVKITDFGFCAKLTESKSKRATMVGTPYWMAPEVVKQKEYGPKVDIWSLGIMAIEMIESEPPYLNEEPLKALYLIATNGTPRLKKPEKLSKELKAFLSVCLCVDVKSRASAQELLNHEFLKHGCPLASLADLLAFKRVAK

SEQ ID NO: 3936 - DNA, 5205 bp, Myceliophthora thermophilia
atgtctgaactgcgcgcactcgaggcccttcaagccctgcacggggagctggtcgctgtccgccagcaccggtacgagggcctgccggtcctggaacagctcctggacgcgcaagccgacgcgttcaaaaagctgatcgacaagcctccgcgaaactcagcccacagacaatccctagggactgggaaggtcaagattgacgaagacgagtacgcgatcaacgatgacttcgtcaatgactgcctcaaggttgccgacgacctggacctggacgaactggaggcggcgaggattctgctggactgcgatgccgaaggcgacaccgagacgcaaagccgtccgttgtgggaatgcgccgtcattcgtttccaccaggagcgcaggtaccttctcgactgcatgcgcctcatttgcgagatagcggccgacgacgagcttgaaccggagctacaggactccttcggcgccattgccgaggagaaggtgtttggcattccgccacctgggtcaagggcgggggaggctgtgaagaaggctgtgccgaggttcatggaggccatgcagagtgtgcggtccatgctgcatagcatgatggagaaggccacggggcggagcttgctgcagcaggccgacctcgtgcgggcgccggaaaaccaagaaacgttcgacttctcgcgcgcaagcctcgtggagcagcacgaatgtctggcagcaattctacacgccgccgtcgagaaacgtcatgcgaccgtcaaagattttcaagacttcatcgagaccctgaggagggttgacaagtacgaccactttctcgtgcacctgttcccagtcctcgcggcgtatatctcagcgttcggctccaccgagggagtgagcgatctccagcaagcccgccagctgaacggggtagtcatcaagccgaccgacgacgcctgggcccttccacatcttggcgccgccgtccgggcatggtggattgccgagtacagtgaatggtacttggacgacaccatctacgactttcaggggatcaacctcgacgaggaagacgaggagaggaacaaacaattcatggaggcgctaaaggagggtgccttcgacttcatcttagctgtggctgctgattgtagggcccaggaatggcaggacccgtcgcgcctgggaatgcgtcaatggctccagcggaagtctcctcccctggcttcggatcccttccccttcagccactttctccagcggagcttgatggtacacttggaggaattcgtggacgcttgcatctccaaccttccagatatgcttcgaaaactaagaacccaggaggatgagcagagacagctcagccaaaaccacgagcaagactttgatctcgagcgcttcctgataatcgtctcatatgcctacgaagggcgacctgacgcggccatgtctttctgggaggatccagatagcaacctggccggcttcttgcactgggcgtcaagacgagcatccactccgcttgtgagcgcgttttgcgaaatgctgcagtgcctctcggacagtgaggaatgtgcaacggctgctcacatgtttctgctagacgagggccaccaatcttccggcaagatgaagcgctcccagtcattgacgtggtcccaaatcttcaaagagctggattattttacgagacagcttcgtgataagccagcgccggcacaggcccaggtcatgcaacgccccagtaaacctggagctgacttggccgagacggagcccgagtctgcattgatgctggagtgctatttgagactgattgccaagctgacaacagagagcgcggttgcccggcagaggatgttgatggacgaggagatgcggctggtcgatacactcttcaggcttggagatggtccactaccggctcggctccgcgcttgcatcttctacgtcctgaaagccttgatgacgcaaaagcaagtccccgaaagtgaagcgctctggagatatgtcgatgcgtgggcaacgaacaccctgcctaacccgggagcccagcaaagggtgacatacctcgggcagcctctcaccccggaaggtcacatggaagcaatcttaaacgaccttagcggtggcttcgaagagtcgaacgcgttcattcagcttctcgcgtccctcttcgcccctcttgatggccccgaggggctgaacgacagcctgacgttccccgaggatctggggagtaacattcgcgcgcctgggatggagccctacgtcgactttgtcttccgcgtcttctcgcagaagtcccaggagcttgcagatcctggtcagctcagagcgctgcgcctcagctgtctcgaattcgccttgacctgcttgtcgactttcaacgaggacttgatcatcttgggtaatgagagcaatattgccattgacgtggcgatgccgactaccgatctggccacatacgttcgccttcatccgttcgcccgcgtcatggagtggctgttcaacgaaaaggttgtcaacgcccttattcgcactatccaccaagatcccgtcagtctaggcagcgcatctcccgactcgcctctggttctcagcattctacggggcatccaagtcatgatcaaggctctcgacctacaggagacttatctgcaccttgtgcgccctctcgttcagtcggagaagcaacgacgcgcttcggtggccaacgccgcgtattcctccttcgaggacggtatcttgagccaccttggcttggtggtcgacctgggcaagtactgcaatctcggccacggtgagttgacccttgcctgtctgaagctgctcgagaagatctctacgtcccccaggatcatctcggcgtggaacccggataccggccgtcttgggcaccggaataaagcgatcgtccaacttgagaaggacggggaggggcataccatcgccgcgtcgctcgccgcaaatatctctgcccccttggacccggctctggaggccgagtcggaaaattacgtgatcaagctgtttattctggatttcatctacgagtgcctcaaggcgacgcccgaccagccaaccatcgctcacctcctcctcggtttccactgcgagctgaaccggctaaccatcgagccgaggggggcgtttgacgctcagaaatcactgttccacagtcttctcaatatcgccattgaaatctcggtgtacgaggaggagcacggcatgcgcgggtacctgatcaccttgaagtaccggatcctgcgcatcttgcagattctctggaagtctccactatctgccactctggttatggacgaattgagagccaccaacttcctcttccacatgcttctgagggagatccagatccagccggacctgagatgggacgacttgcaggcggacaaccccgagttcctgctctcaaacgcctcggtcgcgtatatcgattatcttggggcgcgagccatgatctttgagtacatcggcaaagagctgtgcagcgtctcgcagaacaggataccctccgtcaagcgccagatcttcgacgccttgaacggcacgatcaagatggacaaccaggagcctttgagcctcgccaacatctttgatttctttgacttcctcaatcccgacgccaactgggacgttccgccgccgcaatttgtcttctacaaggacctcgacatcagaccgtccgccgtcgagcatccagaggcggggttacagtataacattcacaaagtacgggagaccatcgcgctgaagcggaacgagttcagggactcgtttcaagtaatgaccccgcagcatctggacgccatcgagaccgaagagagagtattggtcgagtacttgacatttaccaaccgtcagaagctgttcggcgcggcgaggctcaccctgctcagggcgtgggccaacctgctcctggtgatgttcgaagccaacgactttaagggcacgcataagatggcgttcctgctgcaagcactgcaggccatcctgccaaccctcgaggcctacagcacgctgagccacgccgaagcattcgagcttgcgcgagttgccaaagtgctcctttttaagctcgacctcgacgatgatgacgacagctccggctcggcagtggaaagagagagatttgccattggaaacctcatcagcgacaagctcttccagctcttccaggtctgtctcagctccattagcaagtgggcaggcagtgccgaactccgctcgctgtactatggcatctgctaccgctacctcaccgccgttgtcgacagagacgccacggcggcgccagggcctcgcagccgcggtctcgcaactgcccgtgccagaaccttgaaggcaatccaactccacggcgaccgcctcctcaacgtgatctgcgacgacgcttacggtagcgatattacctgccaaaccgccgctaccgtcctccttttggcactcgtccacacctcgcggcgctcggacgacgatgtgaccatcatcgaatctctcaaccgtctcaacttcctcggcgtcctcgtcgactccctgaaaaccatcctcaccgactggctctccgtcatcagcccccccgccaactccggccccccgaattccgccacccaacagcagaccgaacagtacctctccgctaagctcgccctcctcctgcagatcgcccagacgcggcccggcgcaaagtacatcctccaagcgaacctgttccgcgccctcgagatcgcaggcgtcttcgccgcggacccggagctgcaggtcgacgcccgggatacccgcgcgctcgagaagcactacacgctgctcgtggcgctggcgcgcatcgtcggcgcggcggtgctcgcgcgcggcgcgcacaacgtggtgcaggggcggcgtttcctgacgcagcaccggatgctggttgtgcatacgctcaagcggagcgcggggattgggatgggcatcggcggcggcggcggtggcggtggacagtggcaggggcaggggaatgggaccagcctgtttggcggaagtgtcgtggcgagagggggaggaggggggggccaggatgacgcggaagcgcaggcggcgctggaggagaggattgacgagctggcggaggcattcatgctcctgatcactgcgaccgactttttggagtatgaggcgggccaggttcctgctgagaagccgagggtggcacccacgcttttccattga

SEQ ID NO: 3937 - protein, 1734 aa, Myceliophthora thermophilia
MSELRALEALQALHGELVAVRQHRYEGLPVLEQLLDAQADAFKKLIDKPPRNSAHRQSLGTGKVKIDEDEYAINDDFVNDCLKVADDLDLDELEAARILLDCDAEGDTETQSRPLWECAVIRFHQERRYLLDCMRLICEIAADDELEPELQDSFGAIAEEKVFGIPPPGSRAGEAVKKAVPRFMEAMQSVRSMLHSMMEKATGRSLLQQADLVRAPENQETFDFSRASLVEQHECLAAILHAAVEKRHATVKDFQDFIETLRRVDKYDHFLVHLFPVLAAYISAFGSTEGVSDLQQARQLNGVVIKPTDDAWALPHLGAAVRAWWIAEYSEWYLDDTIYDFQGINLDEEDEERNKQFMEALKEGAFDFILAVAADCRAQEWQDPSRLGMRQWLQRKSPPLASDPFPFSHFLQRSLMVHLEEFVDACISNLPDMLRKLRTQEDEQRQLSQNHEQDFDLERFLIIVSYAYEGRPDAAMSFWEDPDSNLAGFLHWASRRASTPLVSAFCEMLQCLSDSEECATAAHMFLLDEGHQSSGKMKRSQSLTWSQIFKELDYFTRQLRDKPAPAQAQVMQRPSKPGADLAETEPESALMLECYLRLIAKLTTESAVARQRMLMDEEMRLVDTLFRLGDGPLPARLRACIFYVLKALMTQKQVPESEALWRYVDAWATNTLPNPGAQQRVTYLGQPLTPEGHMEAILNDLSGGFEESNAFIQLLASLFAPLDGPEGLNDSLTFPEDLGSNIRAPGMEPYVDFVFRVFSQKSQELADPGQLRALRLSCLEFALTCLSTFNEDLIILGNESNIAIDVAMPTTDLATYVRLHPFARVMEWLFNEKVVNALIRTIHQDPVSLGSASPDSPLVLSILRGIQVMIKALDLQETYLHLVRPLVQSEKQRRASVANAAYSSFEDGILSHLGLVVDLGKYCNLGHGELTLACLKLLEKISTSPRIISAWNPDTGRLGHRNKAIVQLEKDGEGHTIAASLAANISAPLDPALEAESENYVIKLFILDFIYECLKATPDQPTIAHLLLGFHCELNRLTIEPRGAFDAQKSLFHSLLNIAIEISVYEEEHGMRGYLITLKYRILRILQILWKSPLSATLVMDELRATNFLFHMLLREIQIQPDLRWDDLQADNPEFLLSNASVAYIDYLGARAMIFEYIGKELCSVSQNRIPSVKRQIFDALNGTIKMDNQEPLSLANIFDFFDFLNPDANWDVPPPQFVFYKDLDIRPSAVEHPEAGLQYNIHKVRETIALKRNEFRDSFQVMTPQHLDAIETEERVLVEYLTFTNRQKLFGAARLTLLRAWANLLLVMFEANDFKGTHKMAFLLQALQAILPTLEAYSTLSHAEAFELARVAKVLLFKLDLDDDDDSSGSAVERERFAIGNLISDKLFQLFQVCLSSISKWAGSAELRSLYYGICYRYLTAVVDRDATAAPGPRSRGLATARARTLKAIQLHGDRLLNVICDDAYGSDITCQTAATVLLLALVHTSRRSDDDVTIIESLNRLNFLGVLVDSLKTILTDWLSVISPPANSGPPNSATQQQTEQYLSAKLALLLQIAQTRPGAKYILQANLFRALEIAGVFAADPELQVDARDTRALEKHYTLLVALARIVGAAVLARGAHNVVQGRRFLTQHRMLVVHTLKRSAGIGMGIGGGGGGGGQWQGQGNGTSLFGGSVVARGGGGGGQDDAEAQAALEERIDELAEAFMLLITATDFLEYEAGQVPAEKPRVAPTLFH

SEQ ID NO: 3938 - DNA, 1230 bp, Myceliophthora thermophilia
atggacgacaacttctttgccggaaccttggacgatttttacgatgctcgaaccgagcccgagacgggcccaaattcaacatctcagcgccgtctcgtcgaccaggatgtgcttttcggtacaagggtccaggaagtatccgctttgccatccgatgctctcggcatggggcttggtccaggtcccactcgggccgcccccaatagctccaataggtcgaccccggcgcaggctcggcgccccgagccttctcgcccccatgcattcagtggggaccgggcgggtccagatcaaggtctcttccagctcaacttcctcccgcaccgcgcctccagccgtcctcccatttttgccacatccactccaactccgacccgccgcgcagtctcgaccgtgtttcctgctcgccgcttccaaaatccctctacgatctcgaaccgccagcggggtcacggaaacaatttccgcagcgccgcaaggccgtctcatagcccttcggccgcctcgcagcgcctgccgcatcagcaccgggcaggcggtatttcacgttctgtagatcttgtcgctgatcgcgtcgcgcggccttcccaacgtcgaccagtctctttcgcgcacgacggtcgccagcggatcccgacgtcgcccagcatgtccgccaacgctcgtaggagaagcctacgcccgaacgacttgacaatgccctcaactcccagccagccaacccagccgtcgcagcaacccacgtcgcgctccgcacaaccagaacagtcacagtcggcttcatccgcaaccaagcgcaagcgggaaccggacctcaacgatgacgacgacccttttggcgactctgccagcgcagacattgttgatctggtggacaagaccgaggtcccgcccaatacctccaacagccaagaagaaaacaagaaatacgtcacgatgtctactctcgactgcgtcatttgtatggacagcgccaaggacctgacggtcactcattgtgggcatctattctgctccgcctgtcttcactccgctctcaacatggaccacagcaggcgtatatgccccatctgccgccaaaagatcgataggcagccggccgccggcgctaagtttggccagaaagcgaagggctactatcctctcgagctcaagttgatgaccaggaaaaccataggagtcaaaagggagcaatcaactaccggccgcgacgggccatcgtcgcgttga

SEQ ID NO: 3939 - protein, 409 aa, Myceliophthora thermophilia
MDDNFFAGTLDDFYDARTEPETGPNSTSQRRLVDQDVLFGTRVQEVSALPSDALGMGLGPGPTRAAPNSSNRSTPAQARRPEPSRPHAFSGDRAGPDQGLFQLNFLPHRASSRPPIFATSTPTPTRRAVSTVFPARRFQNPSTISNRQRGHGNNFRSAARPSHSPSAASQRLPHQHRAGGISRSVDLVADRVARPSQRRPVSFAHDGRQRIPTSPSMSANARRRSLRPNDLTMPSTPSQPTQPSQQPTSRSAQPEQSQSASSATKRKREPDLNDDDDPFGDSASADIVDLVDKTEVPPNTSNSQEENKKYVTMSTLDCVICMDSAKDLTVTHCGHLFCSACLHSALNMDHSRRICPICRQKIDRQPAAGAKFGQKAKGYYPLELKLMTRKTIGVKREQSTTGRDGPSSR

SEQ ID NO: 3940 - DNA, 1023 bp, Myceliophthora thermophilia
atgcgcatccatttgttttggccaatcaggtccgattacaacaacaacaacaaggacgaagacgacgacaacaacaacgagattacgcagtgtttcttcgcccgcgatcgaggcgtcccccagcagatgcggcggacggtttgcccttcaaaaacgtcgaccctccacctctccgctgccaacacgggctccagctggaagagtgcgctggaaagggaccacaatattgatccgtacactctccactacaccgccctgccactgctcaaccggtccgggagtcctgctatgacggttggaatgcacatgctcttcacagcatcaagcatgggatatacgccttctatcttgacgctgatgggcatcctcgtgcgctcgcccgaaaatgtctacgccaaggcgcgagtgtcgccgtcctggcgcgaggtcgatgcgcggtttaagcgattgcttcaaaccgagaagaaccccgacgccttcacactgcaggggctcttgctgctgcgcgaaggcaggggcgacctcttcgcgctgaggtactttgacagggccgtcgaggcggcgcgcgacatgccagggacgcaaccgggaccggtcgagcaagatgccccgaccattcgcgagccgaggtggaccctggaagctttctgccacaggaaccgcggagccattctgctgaagcagaaccggagagaagaggccatggccgccttcaggatcctcgcgctcgagctggacctcccagacggctacgccgagctggccaagatgcttccgccacacgcgaaggaacgcgagacctacctcctgaaagccgcacagggcggcagcttcgaggcctgcgcgctcctcgcgctccacatggccgacaaggccgctgactcagatctccctcacggcgatcgcgttgtcgctgcgggcttggcccgcgaatgggcgttgatcgagccggacgatgcgaagagggagcaggtgctggcccaggtagcggagaggaccaaggcggtctctggggagagatag

SEQ ID NO: 3941 - protein, 340 aa, Myceliophthora thermophilia
MRIHLFWPIRSDYNNNNKDEDDDNNNEITQCFFARDRGVPQQMRRTVCPSKTSTLHLSAANTGSSWKSALERDHNIDPYTLHYTALPLLNRSGSPAMTVGMHMLFTASSMGYTPSILTLMGILVRSPENVYAKARVSPSWREVDARFKRLLQTEKNPDAFTLQGLLLLREGRGDLFALRYFDRAVEAARDMPGTQPGPVEQDAPTIREPRWTLEAFCHRNRGAILLKQNRREEAMAAFRILALELDLPDGYAELAKMLPPHAKERETYLLKAAQGGSFEACALLALHMADKAADSDLPHGDRVVAAGLAREWALIEPDDAKREQVLAQVAERTKAVSGER

SEQ ID NO: 3942 - DNA, 2121 bp, Myceliophthora thermophilia
atggaggacaggaagagacccgcgtctggcgcggtcgacgacggcgctccgccgagcaagcgacaagccgttaatggaagcagcaagtccaaggatgattccggcgacatgagagaggaggcctggattgaggaatatcaaaagggcgcgatatatcggcagatgctggaatacaagcgagaaaagatcaacctcgaaaatcgcgtccaggaactcgagaagaactcgactgatcacgacgaccatatccggatagtcgacgcttgggtgctccagctgctgcaagaaatcgagctgcttgttgagggctcagtatcgtccaccagttcagcagatctagcaccaggatccgcgcttgcattcaaggacagcaaagactttcagaggcacctcggcgacaaggggaaggccttcaagtcaaagtcggatgcgatattgaagcggctagcgagcgcgcggggcgaagtcaagccggaggtttcagaactcgagtcccagatcaggtctctgttggcgcagcaaaaagagttgatcgtcaaagtcgaccggcttgaggcacaaaatgcatcactttcggagcagtacgacaaggcgacgttgaaggttatcaaggcggaacgcaagctggaccgggcaaggagcgcccaagtacagaaactggagcaacaagcgctggctgggtccacagctcacgcagcctcaaaagacgacagtggtgccagttccggtgccgcgaatggggacaacgaggcgctcaagctgcaatatcaagaggcaatggccgttgtggccaagcagaaggagcaactcgaagccgcgctatccgagaacaaggctctgatcgaggagaattcgacctacaagattaagaaggaggctgtgacggacgaggagtatgcccggaccgagctcttcaagcagttcaaggcacagaacgaggatctgatcaagcgcatcaaccatctcgaggcgaccaacaagcagctgcgggaagaagcggagaaactgcggggcgagagaagcgagtggaaaaccaagctcgaacacgaggcgcaggtcgccaccctggagctggaggaccagcttcagcagaaagaccaggatctcacccgcattcgctctgcgcgcgacgagctcatggcagaggtagccatgcgcaaggctagccaggaccaggagaagaccgccctggcgcagatcaaggagctctccgaggcacaggtagatcgcattgcccagctggaatcggaactcgagagactacggccaaacgaggacactgccatgacggatccccgcccagatctcgaggccctgccggtggaagaacttcggcaaagatatgtgaaattagaaaaggactttgaggctatcaacaaggaattgccacttctggagaagtcgtataagaagtcgatggccctagcgcacaagaaggtcatggatttccaccacctcgaggagcgggtcgcgacgcttacggctgagaagagcaaggcggatcagaagtatttcgcggccagaaaagacatggacatccgcaccgccgagatccggacattgcgggcgcaaaatggcaagagctccgagatcatttctcagctgaaggacgtcgaggcgcagaaccgggctcttatcagcagccttgagaagcaaatcgcgacgttgaagaatgaactctcaaccgcgatgatggagaggaagaggctagagcaggtgagcacagaggcgacacgacgagccgactcgtgcaagtcgcagatatctagcctcgccgacctggtcaaagccaaggacgcggcggtcgcgtccatgaaggagcagctcatgaaagttgagacggagctggaaaaggccaaggtcgacgtcaaggagatcagcaaagagtgccacaagtggaaagtcaagagccagagcaactcgtcagaagaggaggaggcactgaggaatttggtgatttgctctgtctgccgaagcaacttcaagaacactatcttgaaagggtgcggtcacgtcttctgcaacaactgcgttgacgaccggctcgcgaaccggatgaggaagtgcccgagctgcaacaaggcatttgacaggtccgatgccatgcccgcccatttatga

SEQ ID NO: 3943 - protein, 706 aa, Myceliophthora thermophilia
MEDRKRPASGAVDDGAPPSKRQAVNGSSKSKDDSGDMREEAWIEEYQKGAIYRQMLEYKREKINLENRVQELEKNSTDHDDHIRIVDAWVLQLLQEIELLVEGSVSSTSSADLAPGSALAFKDSKDFQRHLGDKGKAFKSKSDAILKRLASARGEVKPEVSELESQIRSLLAQQKELIVKVDRLEAQNASLSEQYDKATLKVIKAERKLDRARSAQVQKLEQQALAGSTAHAASKDDSGASSGAANGDNEALKLQYQEAMAVVAKQKEQLEAALSENKALIEENSTYKIKKEAVTDEEYARTELFKQFKAQNEDLIKRINHLEATNKQLREEAEKLRGERSEWKTKLEHEAQVATLELEDQLQQKDQDLTRIRSARDELMAEVAMRKASQDQEKTALAQIKELSEAQVDRIAQLESELERLRPNEDTAMTDPRPDLEALPVEELRQRYVKLEKDFEAINKELPLLEKSYKKSMALAHKKVMDFHHLEERVATLTAEKSKADQKYFAARKDMDIRTAEIRTLRAQNGKSSEIISQLKDVEAQNRALISSLEKQIATLKNELSTAMMERKRLEQVSTEATRRADSCKSQISSLADLVKAKDAAVASMKEQLMKVETELEKAKVDVKEISKECHKWKVKSQSNSSEEEEALRNLVICSVCRSNFKNTILKGCGHVFCNNCVDDRLANRMRKCPSCNKAFDRSDAMPAHL

SEQ ID NO: 3944 - DNA, 1137 bp, Myceliophthora thermophilia
atgatcaacggcatcatcaaccgtcctgccctgggcaacttcccctcggccgagtgggccaacatcctcaagacgagcattctcaaggtcgcccccaagggtctcaaccaagtcttcacggccatggctggttcggacgccaacgaaaccgcgtacaaggccgcctttatgtggcgccgccagcgcgaccggggcggcccgtccgccgagttcaccgaagaggagatgaactcagccatgaataaccagtcaccgggctcgtccaagctttccatcctctccttcaagacgggtttccacggccgcctcttcggttccctctccaccacccgctccaagcctatccacaaggtcgacatccctgccttcgactggccgcaggccacctttccgcagctcaagtatcccctggatcagcacgcagccgataacgcggccatcgagcgcgccgccctcgacgaggtcgaacatcttatcacaacctatcacgtcccgccttgcgccgtggtcgtcgagccgatccagtccgaaggcggcgacaaccacgcgacgccggccttcttccgcggcctgcgcgagatcacgcgcaagcacggcgtgctgctcatcgtcgacgaggtccagaccggcgtcggcgcaaccggccgcttctgggcgcacgagcactgggacctgccgcacccgcccgacattgtcaccttcagcaagaaggcccagacggccggctactactttggcgacccctccctgcggcccaaccgcccgtaccgccagttcaacacgtggatgggtgacccagcccgggcgctcctgttccgtgccatcatcgacgagatcgagaagcatgatctggtcaggcacacggccgaggtcggcgactacctatacgggaagctggagcgcctggccgccaggtatcctgacgagttccggaacctgaggggcaaggggatgggcaccttcattgccttcgacagccccaggagggacgagttcctggccaaggccaagaccttcggcgtcaacattggcggctgcggccagaacgctgtccggctgcgccccatgctcatctttgagaagaagcacgccgacattttggttgacacactggaaaagattgtcacgtcctggtaa

SEQ ID NO: 3945 - protein, 378 aa, Myceliophthora thermophilia
MINGIINRPALGNFPSAEWANILKTSILKVAPKGLNQVFTAMAGSDANETAYKAAFMWRRQRDRGGPSAEFTEEEMNSAMNNQSPGSSKLSILSFKTGFHGRLFGSLSTTRSKPIHKVDIPAFDWPQATFPQLKYPLDQHAADNAAIERAALDEVEHLITTYHVPPCAVVVEPIQSEGGDNHATPAFFRGLREITRKHGVLLIVDEVQTGVGATGRFWAHEHWDLPHPPDIVTFSKKAQTAGYYFGDPSLRPNRPYRQFNTWMGDPARALLFRAIIDEIEKHDLVRHTAEVGDYLYGKLERLAARYPDEFRNLRGKGMGTFIAFDSPRRDEFLAKAKTFGVNIGGCGQNAVRLRPMLIFEKKHADILVDTLEKIVTSW

SEQ ID NO: 3946 - DNA, 375 bp, Myceliophthora thermophilia
atgcagcacatcgcgttctggccaagcgctggagataattacggcacaaaaatagttaagccttcagttttatcgctgcctagtggtgttaaggaccgctcctcggcgcacaacgaactgtcttcgcgatccgatgaaccattgcagtttcgcattggtagtgccacgcataaccttaccaatccccacaaccgcaacatcgcttccagccaagcaagccgtatctcacacaccgctgccacgaaactgaacaccccaccaccaccacccccctgctctggggtcagatgcatctttcctattccaccatgctgggcccccagtctccacaaccggaatcacggcccacaacaggctgcgccgagcggccactaa

SEQ ID NO: 3947 - protein, 124 aa, Myceliophthora thermophilia
MQHIAFWPSAGDNYGTKIVKPSVLSLPSGVKDRSSAHNELSSRSDEPLQFRIGSATHNLTNPHNRNIASSQASRISHTAATKLNTPPPPPPCSGVRCIFPIPPCWAPSLHNRNHGPQQAAPSGH

SEQ ID NO: 3948 - DNA, 1788 bp, Myceliophthora thermophilia
atgcctccgccgctcaaccggttcccaagcggacccaacaccatctccccctaccaccagcagtacccctcccacgctcagcatgcgacgagtcatccgccgcccctgggcgccacagcggcctatctcaacgctcaggtcggccaggtgaacccgttctcgggaaacagcaacctattaggcctggcgggggggctcaatgccgccgccggcttcggcgtcggcgtcggcgcggactctggcctggcgaaccacgccgcgcgcctgggcttcacgcacgtggggagcctgcagcagcagcaacaacaatcgcaacaacaggccctccagcaacagcagcagcagcagcagcagcaacaacaacaacaatcacagcacagccaacatgctcctcccgttcagcacccacagcacgcacagccgcaaggtcacggattggtggagcacgccacgcgagttgcgcagaaagggcggataagagaggtgtggaaacacaatctgcacgaggagtttgcgacactgcgagacctggtcgacaggtatccgtacattgccatggacaccgagtttccgggcgtcgtcgcgagaccgatgggaggcttccgagggaaaagcgactaccactaccaatgcctacgtaccaacgtggacctgttgaaggtgatacagatcggcatcgccctcttcaacgaggacggcgaacagccgcccgcccgcccatcctcgaccgactcggcggacctgcgccgggcaggcagtcaagcaccgctaccctatgcttggcagttcaacttcaagttctccatcaaggatgacatgtacaaccagacatctatcgagtcactgcagcaagcgggcatcgactttgcgctcctcgagcgggacggcattgacccgcacgagttcgcgtccctgctgatcccttcaggcctcgtctgcttcgaccacgtccgctggataagcttccacggcggctacgacttcggctacctcaccaagctcctcatctgcagcccgctgccctgcgacgaggtcgagttcgaccagaagatgaaacgctacttcccctccacgtatgacgttaagcacctcatgaagcacgccatcaagttgcacaacagcggcatgctcacgccctccgacccgagcgcgatcgacgttatgcaaaagttcgagcagaagtccgggctcgagcacatcgctgagacgctcaagctcaagcgcgtcgggagcgcccaccaggccgggtctgatagcctgctgacgggccgcgtcttcttcgagctgcgcaagcgcatcttcaacggcgacatatcggatgagcacctgggcaaggtctggggtctcggcattccagacttctccgtcggcggcgccggcatcaccgtcggcaacaacaacaacaacaataacaataacagcgggaacgccgggaaccaggttgaaaacactccgccgaccaacaatggcaacaaccaccagcagcagcagcagcagcagcagaaccctcagaaccatcaccaagtgaacggcaatggcactccgagcacgcccaatacaggcagtgtcgggctagctggcacaccgggaggcgcctcgtcatcccaaaataccaatgggagtgccgctggcggtggaaatgcaggcagcagcagcagcagcaacaacaacaacaacaacaatagcaacaacaacagcaacaacaccgccagcggaatggggcccatgactcctggcgggggcggcggggtgtttggggcgtttgcttttgcgggaaattcgcggtag

SEQ ID NO: 3949 - protein, 595 aa, Myceliophthora thermophilia
MPPPLNRFPSGPNTISPYHQQYPSHAQHATSHPPPLGATAAYLNAQVGQVNPFSGNSNLLGLAGGLNAAAGFGVGVGADSGLANHAARLGFTHVGSLQQQQQQSQQQALQQQQQQQQQQQQQQSQHSQHAPPVQHPQHAQPQGHGLVEHATRVAQKGRIREVWKHNLHEEFATLRDLVDRYPYIAMDTEFPGVVARPMGGFRGKSDYHYQCLRTNVDLLKVIQIGIALFNEDGEQPPARPSSTDSADLRRAGSQAPLPYAWQFNFKFSIKDDMYNQTSIESLQQAGIDFALLERDGIDPHEFASLLIPSGLVCFDHVRWISFHGGYDFGYLTKLLICSPLPCDEVEFDQKMKRYFPSTYDVKHLMKHAIKLHNSGMLTPSDPSAIDVMQKFEQKSGLEHIAETLKLKRVGSAHQAGSDSLLTGRVFFELRKRIFNGDISDEHLGKVWGLGIPDFSVGGAGITVGNNNNNNNNNSGNAGNQVENTPPTNNGNNHQQQQQQQQNPQNHHQVNGNGTPSTPNTGSVGLAGTPGGASSSQNTNGSAAGGGNAGSSSSSNNNNNNNSNNNSNNTASGMGPMTPGGGGGVFGAFAFAGNSR

SEQ ID NO: 3950 - DNA, 798 bp, Myceliophthora thermophilia
atgtcgaccatcacccctaccgcgctgcagagctcgcagccgccgattatccctctcgacttcaatgcgaatcagcccgagaccatccgcctgtaccctctctccaactatacatttggcgtcaaggagacgcagccagaggaggatccgagtgtgctggcgcggctgaagcggctggaggagcactaccaggcgcacggcatgcggcgcacctgcgagggcatcctggtctgccatgagcacaaccatccccacatcctgatgctacagatcgcaaacgccttctttaagttgccgggagactacctgcggcccgaggatgacgagatcgagggtttcaaggcacgcctggacgagcggcttgcccccgtcggcagcctcggcgagggcaacaaggctggcgactggcaggtcggcgactgccttgcgcagtggtggcgcccgaacttcgagacgttcatgtacccgttcgtgccggcgcacatcacccgtcccaaggagtgcaagaagctgtacttcatccagctgccgcagaccaaggtcctgagcgtgccaaagaatatgaagctgctcgccgttcccctttttgagctctacgaaaatacccagagatacggccctcagctctccgctatcccccaccttctgagccgctacaacttcgaattcgtcaacgaggagggcgaggtggtcgccaggacgcccggtaccggcggtcccgacggttacgttcccaagactaaggtcctcgccgggggcgacgacgtcgacatgaagacggagaacggcacgcactga

SEQ ID NO: 3951 - protein, 265 aa, Myceliophthora thermophilia
MSTITPTALQSSQPPIIPLDFNANQPETIRLYPLSNYTFGVKETQPEEDPSVLARLKRLEEHYQAHGMRRTCEGILVCHEHNHPHILMLQIANAFFKLPGDYLRPEDDEIEGFKARLDERLAPVGSLGEGNKAGDWQVGDCLAQWWRPNFETFMYPFVPAHITRPKECKKLYFIQLPQTKVLSVPKNMKLLAVPLFELYENTQRYGPQLSAIPHLLSRYNFEFVNEEGEVVARTPGTGGPDGYVPKTKVLAGGDDVDMKTENGTH

SEQ ID NO: 3952 - DNA, 1575 bp, Myceliophthora thermophilia
atgtatttagacagcatccctaagtggctccggcacttggaagaaccaacgcatcttatcaccacttctgcagacccgtcccacgaatcggatgtggctcaactggagtggaactaccaggactctggctccactgacaccaccacccaggacacgaccacgcacctgcacgcgcccactggcctacctgcagccatgcaacagggcaccgagcaccgtgacgaagagggcatgtcggtcgtcactgaaaccgcggccaccactacaactggtccgacatcccaggccttgctacggccagattcgacactccaaccgcccgagcctgcgcctcagcctaccacgccgaccaggcccgctcagcgcagggcacctactggcaggttcgcccgtagggctgaaagggaccctgatgacgaagaggaggtcgagtcccagggcagatttaacgatgcgcgcgttgtcttcgacagcctcgaggaggcagaaaacaccctcgcaggcacagagttcgaccccttcaccagcaccaaggtcatcaagtccggcctgctacatccgtccacggccacgacgatcaggcccatcaaggactgccttgcccgcgcccgctgggagtgccgcggcaataaggaaatgctcatccgcacctgccactggatccgccgtttccaccaaaaggccagcaatgactcgtacggggccaatgcggccatgcgcagcctcaagaaaaagctggagaatgcgtgcaaggcctaccacgccaccggtgtagtgcctaccggcatgccagagcctgaggaactgctggcagcccgcatctgcgcgcccaagggagatagcaatgccctggtcgacggttacctattcgaactcggctacctgcactacggcccgcctagtcatcagggcctacaccctgcacccactcacgtcaccacagcccacggtgccgctgaggatgacgaggccgacgaggacttcgccaaacgccggcacctggccaccgagaccgaccttctcagcgtggcccagaccatggtccagaggcaggatgaggccatcagcagtgtcacggaggcccttgaccagatcaaggaagagctcaagcaactgcgggaggcttccacggtcgcaaacaacaaccatgcggccacccttgactggaagaagggagtagatgagaggatgcggcagctggaagggatgatcgcccggcttaccgagcgcactacagcaatcgccgcactgcagagggctcctaggagccaggagcctgtaactcggccacctccgccggccaccactggacgcggtgctcccccgagttcgatcgcccggccggcagcgcacccgccgcccgcgactagcggtcagaaacgcccgcgcccggatacgcctacgcaagagagtctctcgcacaaaagggctactagtacggttcacagtagccgcactacggtcagggaggcccaggccagggccagaacactcgcgcgccctccacaggagcgtccgtctgcagtatctgcattcctcgacaacctggggcctgttgggaggaaaaaggattga

SEQ ID NO: 3953 - protein, 524 aa, Myceliophthora thermophilia
MYLDSIPKWLRHLEEPTHLITTSADPSHESDVAQLEWNYQDSGSTDTTTQDTTTHLHAPTGLPAAMQQGTEHRDEEGMSVVTETAATTTTGPTSQALLRPDSTLQPPEPAPQPTTPTRPAQRRAPTGRFARRAERDPDDEEEVESQGRFNDARVVFDSLEEAENTLAGTEFDPFTSTKVIKSGLLHPSTATTIRPIKDCLARARWECRGNKEMLIRTCHWIRRFHQKASNDSYGANAAMRSLKKKLENACKAYHATGVVPTGMPEPEELLAARICAPKGDSNALVDGYLFELGYLHYGPPSHQGLHPAPTHVTTAHGAAEDDEADEDFAKRRHLATETDLLSVAQTMVQRQDEAISSVTEALDQIKEELKQLREASTVANNNHAATLDWKKGVDERMRQLEGMIARLTERTTAIAALQRAPRSQEPVTRPPPPATTGRGAPPSSIARPAAHPPPATSGQKRPRPDTPTQESLSHKRATSTVHSSRTTVREAQARARTLARPPQERPSAVSAFLDNLGPVGRKKD

SEQ ID NO: 3954 - DNA, 1914 bp, Myceliophthora thermophilia
atggctgatcagtgcattgtctgtctggagcccctggacgtcgaggccagcgccaacccggccccgttagcacctgcggaacagcaggtgctcaaagactaccaccaacgccatgccaccgaggatgcagatgcactcgccaaaccgaaccaagaaagcggatcagagaactccaaccatgagaacgtagccaaaatcgaggtttgcggccacatgctgcacgacgcttgtctgcgggagtggaccgaaaaggcaaacagctgccccatctgccgccagacgttccataccgtcaccgtgtatgacagagttggaggcaagcaactatccatccgtaaagtcgaggacaagaagcaggcacctgtggtgcccgaatacgacccacgagaatggatggaagagctggtcgaacagccagagctccccggccggcattgtcccgtgtgcaactcggccggggacgaggaggtgctcctcctctgcgacggctgcgatgcggcctaccacacccactgcatcgacctcgacgaagtcccgaggggtccgtggttctgcatggagtgcgagcacgccctcggcccggacgttttgcagcccatcgacaacatccctagccgggacggtggcttccaggggcggagctactacttcccccgcacccaggcgagcatgcgccgtgcgaggcaacgagcccagtcggacgagtggcagggggcttggggccgcattaccggccgtgtctgggacgcgctggagcttgacctcgactacgaggacgaggaggacccgtcggtctttgagagcctgcagcgctctcgccaattacgcgagcgggaacgggaggaacacgagcgctggcagcagcgcctgaacatcgccgcccgcctgggtgcgagagacgctttcctgaacaacatgacgcgtcgggtcgagcgcccacaaccagacccgccgactcgcgaggaacggctcgcttggggcgcattggagaaggccagagacatggagtctcgaaaacgcaagtcgcgctcggccacggccgagccgagcgaggagccgcatcacgagcccgagagaaagctgaagcggccgcgcacgagacggttgccacccacaaatggcgagtcgtcgtcgtctgccgctcgcgacgcggggccgtcagaccgccaatcgcgacaagcccagcagcaaagcggctcctcgtcgtcgcaggcaccggaggcgccgccttcgttcttgtcttcgctgctcaaggaggtcgagatgagcacgccgtcagacgaagagacgttgatgcaaatgtttgggccgatcccgggcgttaatgacgccccatccccggcgcatagccacggggcggccacgccgccgccgaaccgcgcaagctcgcccgtgatgacgctcagctcacacatcgcgcccctgtacgcatcaccctcttacactccgaccaggggtctgtcgttggacacggcggagagctcccgctcgtcgtcgcccaagaggacaacggcccgacgagaggcccagtcctcgcccgacaatagcgactcggagcaccggggccgcagaccgcgccagcccgtccggcacgggccgctggagctccggcagccacagccccgacgaacgcataacggggacctgccccggtcgcacaacacatcgcccgcgcggagttcgctccctctggagctgaaagagagcatcagcaagattgtgcggggcgcgctaaagccgcattggcgctccaagcagctgacggccgagcagtacgagaccatcaaccgcgacatctcccggaagatctacgaagaggtaaaggagccggaaatcagtgaggatatgcagcaagcctgggagaggatggcgacgcaggaggtcgcccgcgcggttgcctctctcaaggcttag

SEQ ID NO: 3955 - protein, 637 aa, Myceliophthora thermophilia
MADQCIVCLEPLDVEASANPAPLAPAEQQVLKDYHQRHATEDADALAKPNQESGSENSNHENVAKIEVCGHMLHDACLREWTEKANSCPICRQTFHTVTVYDRVGGKQLSIRKVEDKKQAPVVPEYDPREWMEELVEQPELPGRHCPVCNSAGDEEVLLLCDGCDAAYHTHCIDLDEVPRGPWFCMECEHALGPDVLQPIDNIPSRDGGFQGRSYYFPRTQASMRRARQRAQSDEWQGAWGRITGRVWDALELDLDYEDEEDPSVFESLQRSRQLREREREEHERWQQRLNIAARLGARDAFLNNMTRRVERPQPDPPTREERLAWGALEKARDMESRKRKSRSATAEPSEEPHHEPERKLKRPRTRRLPPTNGESSSSAARDAGPSDRQSRQAQQQSGSSSSQAPEAPPSFLSSLLKEVEMSTPSDEETLMQMFGPIPGVNDAPSPAHSHGAATPPPNRASSPVMTLSSHIAPLYASPSYTPTRGLSLDTAESSRSSSPKRTTARREAQSSPDNSDSEHRGRRPRQPVRHGPLELRQPQPRRTHNGDLPRSHNTSPARSSLPLELKESISKIVRGALKPHWRSKQLTAEQYETINRDISRKIYEEVKEPEISEDMQQAWERMATQEVARAVASLKA

SEQ ID NO: 3956 - DNA, 420 bp, Myceliophthora thermophilia
atgttcaacagatcccacagatctcgcagcagcaagaccccgggttttgcaaacgatcaggaaaggaaggcgcctggtattcaccggtcattgcttgccgagctagggttcgccagctctgactcgtcgacggtacggtctgcaagccgtagcacgtggaggaccgacctggaacgaccgacttacgactacgccagcagcatcgcttctgcacgctcctacggcgctccgtcatacgcgaataagagtaggtcttgcagctctgcactccctcgtttggctgcgtctggtgactggatcttgaatcattccggcggaacttttccgcagcctctcgctgtacctactccgtgtaacgcaggccagacgagggtattgatactgaagaactgcacgtctgcatccaagacagatggctaa

SEQ ID NO: 3957 - protein, 139 aa, Myceliophthora thermophilia
MFNRSHRSRSSKTPGFANDQERKAPGIHRSLLAELGFASSDSSTVRSASRSTWRTDLERPTYDYASSIASARSYGAPSYANKSRSCSSALPRLAASGDWILNHSGGTFPQPLAVPTPCNAGQTRVLILKNCTSASKTDG

SEQ ID NO: 3958 - DNA, 3621 bp, Myceliophthora thermophilia
atggctacaacacccagcttgcaagatgccttgtcacagggggtattgggcgttaaacagccgatcatacacgcgactcgacaccactcggagtctttcgcaccagaccaagaccagagcatgcatccaccagggcagatggtgaccgaccttgctctcacccagggcttgggttctgcagtggtcacagctgacgcgaaatctcatccagagtctacttcttcggaagccgtctcggagaccgttcgacactcgccgaagaaaggcgttgtcactggtgctgacgcaacagaagaagctaaggagccagccgcaggggtcgccgccgctccggacacggcggagagcgaagctagcaggaccgaggcagcagccaacggcttctcaaccactcctgataccgcgacggaaacaccatgctcaagaaatagtcctgctatcctccctaccaatggcggaggagccgacgaagaggaagaagacgacctcgtcgcggccatccgcgaccgcaagaagaaggcttctcacacaggccaagacgccgccaaaccgctgccgtcgggtccgccggggagatccgcagacggcaccacacacaccaatggcgaaggctctcagcgagagctctcgattctcgacggctcggtaaacaatgtcttggtaacccggcttggtctaaagagaccggccagtgtcgttggaagcagtttcctcggcagctacgactacgcggggcggaggcaagaggcaaggcaaatcaccggagccagaactagccatgcccctctcggcgaatccagggagaccacgtctagagtctcgcgcaaaagaccctctccagaggtaatagacctcaccagtatctctgacaacgaagaagaagcccccgatcttttctcgcaccgcggggccaagaaacaccggctggacaagcatggtcgggagagacagcgtacaccagagcacggagagtcccaagcttttgatgatgttaagagagccgaaaagcgctcttgggagaagaggaagaagagagataaagagtactcgcggcgcaggcggcgcccggaccggcgggaggggcgagagaggacgaagcaatggggccagcaaggtgtgggggaagaagaggcttggttagaaatcatccgcggcatccagcaggtgtctggtcaaccgcctccccgagaacacctcggggaacctagccgccaatcaaacctccgtagtgctcagccgaccaacgaactacagcacggccagcagccgagacgacagcctcgccaggatgcctgccagtccggtatgcgcccagaccagggatcccgtaccgtaccgcagcccagtcagggggttcaacatcagataagcgtcccaagtccagccacgcgccctccgagtcaggggttgctccaggagtcgagttcgccgcttggtctcgaactaagtcttcggccggggagcagtcccaaccaggcacagctgcataatcaaaggatcatagacgccatcaagaatcgtcggcctgggactgcgggcgacaacgagagcacaaggcttcaagatgattcgctaggtcggaaacccgcggtgagcgatggtcctctatccacaaccacttacccagaggatgatgctgcgctcttccagacgctagcggccaaggtgcctgaaaaacggaccgcccagttcgtgacgggcctgccaaacggcgacgtgcgtcttggccggaatagcctccaaagggtgggtcgaggagccgggcttccaggggcacaacggcaagcaggcagtctttcgcggcgggcgcctcccgaatcagccctcagtcgccggctaacccagcgcccaaaccttctcctgccaccggacggcaaaagtagccgtcaggccagtcggcttccccagtgccgaaatatctttcagcccaggcagccccaacaaccgtcccgttccgccgctcggccgtgtaccgagatctccacagaccaggacatcgtctcgccaccgccgccggctgcctcctctcgcgttccgtcggctgtctcgcagccccagaacgccggctaccacccgctgctgcccccgagccgcgctcgtgaacgacagcagcagcagcagcagcaagtgacggcgcccacttttcactacgagcccggtgcccaccccgcgcggccgccgcgtgagacggtcccggccgccgaagccctggggccagacaggacggtggtccagtacgtcgtctatcgcaccccacgctttaaccctccggccaacctacggaagagggggacaactggaggaacaagggggggaggaagagacccaggcggggaggaagaagaagaggaggaggaggaggaggaggaggacaatgatgaggagatgctccgaaggctgcggcagcgcagggcggtgcggtgcagcgagcactgctcggtgcaggcggccaacgcgcaggccgcgggacggctcgaccgcccccgcaagggcgtcgtcggcaagagctgggccatggtccgctcctctttctccttctcttcctcctccccctcctcctcctcgggggggaagggggcgtcgtcagcaggaggttcgggccttgtcccaccggagcaagcggcgggaggggcaggagaagaaagagacgaaggggtgctcctgtacgaagggcgcgtgagctacgccagcggggaggtgcagtttttctgggtgggcgaggaggtccgcgacatcggcggcggcggcggcttgacgggcgggctcgggcgggtgcgtgtggaccgggaggcggcggccgtgtatgcgcggaagcggttcgacgtctggtcgagggtggtgtatctcgggaagaggggggaggagcaggcggggtcgggccagaggcaggggcaagggcacgggcacgggcaaggacaggggcagaagcttgttttcgagtgtgctggcaatgaggatggtgaaggaggtggtgaaaaggcgagtgggacgtccgctggagggaataatatggagggtacggagaaggaaggggaaagggggagcgtggcggacgcggctactgctggcaatgacgacgacgataacgacaacaacaacaccgagcccgaccgtgcccgccgctcctctagcgtctcgagcacggcgaccgtcaccttcaccccctacgcaaccccgctggacctcgtcgagatggagacccgccttgaggggagctacacaatgctgcacctagccaaccgggcggcgctggccgccttcctggagctcgcccggccgcggaaccgggggatcgacgaccatcaccactaccagcactcggtccggcccgagatggcggcacgcttcaaggaacacggtctcggaacgcccgggtgcgccagcacggccgagctcgtgttcgaaccgcccgcatggcggccctttcggtggggattcctgaagctagtggtggaggtggtgcagagcgagcttcgcgggccggtggacatcggggacatggtcgtcgagggggacgtgaacgcgcgcgagccaggggtggccggcgaggtcgacgctccagcggtggcgtgccaggtagaggaggagtcggaggaagggaaaggcagcgaagaagaatga

SEQ ID NO: 3959 - protein, 1206 aa, Myceliophthora thermophilia
MATTPSLQDALSQGVLGVKQPIIHATRHHSESFAPDQDQSMHPPGQMVTDLALTQGLGSAVVTADAKSHPESTSSEAVSETVRHSPKKGVVTGADATEEAKEPAAGVAAAPDTAESEASRTEAAANGFSTTPDTATETPCSRNSPAILPTNGGGADEEEEDDLVAAIRDRKKKASHTGQDAAKPLPSGPPGRSADGTTHTNGEGSQRELSILDGSVNNVLVTRLGLKRPASVVGSSFLGSYDYAGRRQEARQITGARTSHAPLGESRETTSRVSRKRPSPEVIDLTSISDNEEEAPDLFSHRGAKKHRLDKHGRERQRTPEHGESQAFDDVKRAEKRSWEKRKKRDKEYSRRRRRPDRREGRERTKQWGQQGVGEEEAWLEIIRGIQQVSGQPPPREHLGEPSRQSNLRSAQPTNELQHGQQPRRQPRQDACQSGMRPDQGSRTVPQPSQGVQHQISVPSPATRPPSQGLLQESSSPLGLELSLRPGSSPNQAQLHNQRIIDAIKNRRPGTAGDNESTRLQDDSLGRKPAVSDGPLSTTTYPEDDAALFQTLAAKVPEKRTAQFVTGLPNGDVRLGRNSLQRVGRGAGLPGAQRQAGSLSRRAPPESALSRRLTQRPNLLLPPDGKSSRQASRLPQCRNIFQPRQPQQPSRSAARPCTEISTDQDIVSPPPPAASSRVPSAVSQPQNAGYHPLLPPSRARERQQQQQQQVTAPTFHYEPGAHPARPPRETVPAAEALGPDRTVVQYVVYRTPRFNPPANLRKRGTTGGTRGGGRDPGGEEEEEEEEEEEEDNDEEMLRRLRQRRAVRCSEHCSVQAANAQAAGRLDRPRKGVVGKSWAMVRSSFSFSSSSPSSSSGGKGASSAGGSGLVPPEQAAGGAGEERDEGVLLYEGRVSYASGEVQFFWVGEEVRDIGGGGGLTGGLGRVRVDREAAAVYARKRFDVWSRVVYLGKRGEEQAGSGQRQGQGHGHGQGQGQKLVFECAGNEDGEGGGEKASGTSAGGNNMEGTEKEGERGSVADAATAGNDDDDNDNNNTEPDRARRSSSVSSTATVTFTPYATPLDLVEMETRLEGSYTMLHLANRAALAAFLELARPRNRGIDDHHHYQHSVRPEMAARFKEHGLGTPGCASTAELVFEPPAWRPFRWGFLKLVVEVVQSELRGPVDIGDMVVEGDVNAREPGVAGEVDAPAVACQVEEESEEGKGSEEE

SEQ ID NO: 3960 - DNA, 1428 bp, Myceliophthora thermophilia
atgcatcgtaagcagcgtcatagccgaggcttggagcctttcacggtgagaccgggatccgagacaggactgtactacattctggtcgcgaatctcgctccccggacgacatggagagagctaaaggcgtttgcatcccaagcctgcgaggtggatcatgctgaggtataccctcctacctccggtttcgttagggtgaaagggcgagccaacttcgaaaacgcgttcaagttcctcgatggcaacacgctcgactaccgcgccctccaagcggatggccggaacctgaaccagagtactgtcgtcaagctcatgccaacggactaccatgcagcaaggatcttgcgcggagacgagggaagaatttacaacgaacccgaaagccccgcctctgattccgccgagccgctgcctcagggcgcaagtgcagtgctgggaagcccgcatttgggattccaggggagaaacagtccggcgttcagcgtgccagatacccagtggagttatgtcacgtcgtcttcatacacggatgatggcgggaggtaccagccagctcctcacgcaatcgttatgccatccatttccggagcatatcaagtcgtagcagcctctagccatggattcgttgcgcaagctcccatcacgccgccgatcacggcataccggacggtgccaggcccgacgggcaccgctgcccacatcactcagcaccagtacaacgaccctagaatgtactatcccgcaggaaccgcctctactatgggtgtgcccggctatgccggctttgtccacatgaccgggagcggctgcggccacttatctgcgatggcttacgaatggcctctagtcccaacccactcgccgctgcagggagacatgaccgccagtcacgtcaacaacaatagcaataacaacagcagcaatggccaggttgagaaggtggagctgccacttaacaaggacggcaaggcgcggggcatcgcgtatatcacgttcagcacagaggaactcgcgggcgcggccgtgacggcccttgagggatgcaaggcagggggcagcaggaagctgtcggcgcggctggtggtggaaggcgtctcgccggagggatcggacgatggtgctcctcggccataccagcgattggctggtggtggtgggagtcggggcggggggagggcaggctctagctcaaagagaggagctggtggcaaggcgccaaagtcgtcattgcaggaacagtctcctcgtacgtcgaccgagacgctgctagtgcagttgaaatctgatacagcggtatccgcactaccatctgcagcaagcgacggccaaaggaagaaagaagaacgcccggtgattgttgatgggagcggaggaagatggaagaaggaaccggcgccggttgtggtgggtagaactgccggcaagtaa

SEQ ID NO: 3961 - protein, 475 aa, Myceliophthora thermophilia
MHRKQRHSRGLEPFTVRPGSETGLYYILVANLAPRTTWRELKAFASQACEVDHAEVYPPTSGFVRVKGRANFENAFKFLDGNTLDYRALQADGRNLNQSTVVKLMPTDYHAARILRGDEGRIYNEPESPASDSAEPLPQGASAVLGSPHLGFQGRNSPAFSVPDTQWSYVTSSSYTDDGGRYQPAPHAIVMPSISGAYQVVAASSHGFVAQAPITPPITAYRTVPGPTGTAAHITQHQYNDPRMYYPAGTASTMGVPGYAGFVHMTGSGCGHLSAMAYEWPLVPTHSPLQGDMTASHVNNNSNNNSSNGQVEKVELPLNKDGKARGIAYITFSTEELAGAAVTALEGCKAGGSRKLSARLVVEGVSPEGSDDGAPRPYQRLAGGGGSRGGGRAGSSSKRGAGGKAPKSSLQEQSPRTSTETLLVQLKSDTAVSALPSAASDGQRKKEERPVIVDGSGGRWKKEPAPVVVGRTAGK

SEQ ID NO: 3962 - DNA, 2193 bp, Myceliophthora thermophilia
atggcagcgactgtgcgctccgtcactcgcgggctccggtccggcgtggtgcagccgaccacgagaagtcgaggggcttcgctgcaaccgaaacgtctcgcaaccggagccgctgcggttcacgcacacgaaccgtcgccgccgccaagctctcacatgccagcaaccggggcgccggcttctttagacggccaggatcttaatggctccgcgcagtcccccgtgcatccggcacgctcgcgtagagaccgcatccgggatgccaagcctttctccgagttcctgaccgactccttccatcgacagcacgactatctgcgcatctcggtcacggagcggtgtaacctacgctgcctgtactgtatgcccgaggagggcgtgcctctctcaccctcgcgggagctcctgacgacgcccgagatcgtcatgctctcttccctcttcgtctcgcagggggtgaccaagatccggctcacgggcggcgagccaacggtgcggcgggatatcgtgcccctgatgcagcagatcggagcgctacgcgcccacggactgcgagagttgtgcctgaccaccaacggactctcactgcaccgtaagctcgaacccatggtcgaggcaggcctgacgggcgtcaacctctctctcgacacgctggatccctggcagttccagctgatgacgcggcgggcggggttcagcgcggtccagaaaaccatggaccgcatcttcgagctgaagcgcgcgggggcgggcatcaagttcaagatcaactgcgtcgtcatgcgcgggctcaacgaccgcgagatcctcccctttgtagaactgacgcgcgagagggacgtcgaggtgcgctttatcgagtacatgccttttgacggcaacaagtggagcgagggcaagatgttcagctaccaggagatgctggacctgatcaggacccgatacccggacctgcggagggttaagggccacaggaacgacacgagcaagacattcgaagtgcccggcttcacaggcagaatcggcttcatcactagcatgactcacaacttttgcgggacatgcaacaggcttcggatcaccagcgatgggaacctcaaggtgtgtctgtttggcaatgccgaagtctcgctgcgagatatcatacgaagagtgaacaagggcgagcccattgacgagacggccttcaaagcgctggagcaggcggccttggagaggatagagagccccccaagccctgcctctcagccgctggtggtgcctaactcggatgagctcctcaacgtcatcggcatggccgtcaagaggaagaaggagaagcatgccgggatcggggagctggagcacatgaaaaaccgaccgatgatactgattgatgctccaacgtcacccccgggccgcacccggaatcgtctgtcgtggcatcatgccggcttgccgtctaggcctctaccctcaaagcacctacctggcttactgatccctcccttcaccacgaacagcgcggccaccactcaccaacaccgcttcttttcgaactctacacgccgcaacaacagcaacaacagcaacaacaacaaaagcaaaaacaataatgacaacgacgtcggcgagaagaacgacaacgccgcaggccccgcccccaggctaacgcacgtcaccgcctcgggctctgcacacatggtctccatctcggacaagaccccgaccaggcgcaccgcccaggccaagtgcgccgtgcgcttctcctcgcccctgccgctcgccctgatccgggacaaccagatcaagaagggcgacgtgctggcggcggcgcgcatcgcgggcatcatggcggccaagcgcacgcccgacctgatcccgctctgccaccccatcgcgctgacgcacgccgaggtcgagctcgtcgcgccgccgccgccgccgcaaccggcgagctcgggggcgggggatactgatgatgatgatgatgatggtagtagtagggtgctcgagatcacggcgaccgtctcatgcgacggcaagaccggggtcgagatggaggctctcacggcagccagcgcggcggcgctgacggtgtacgatatgtgcaaggcggtggataaggggatggtgattgaggggttgagggtggtgctcaaagagggcggcaggagcgggcgctgggtcgaaggagacgggagccgtggttag

SEQ ID NO: 3963 - protein, 730 aa, Myceliophthora thermophilia
MAATVRSVTRGLRSGVVQPTTRSRGASLQPKRLATGAAAVHAHEPSPPPSSHMPATGAPASLDGQDLNGSAQSPVHPARSRRDRIRDAKPFSEFLTDSFHRQHDYLRISVTERCNLRCLYCMPEEGVPLSPSRELLTTPEIVMLSSLFVSQGVTKIRLTGGEPTVRRDIVPLMQQIGALRAHGLRELCLTTNGLSLHRKLEPMVEAGLTGVNLSLDTLDPWQFQLMTRRAGFSAVQKTMDRIFELKRAGAGIKFKINCVVMRGLNDREILPFVELTRERDVEVRFIEYMPFDGNKWSEGKMFSYQEMLDLIRTRYPDLRRVKGHRNDTSKTFEVPGFTGRIGFITSMTHNFCGTCNRLRITSDGNLKVCLFGNAEVSLRDIIRRVNKGEPIDETAFKALEQAALERIESPPSPASQPLVVPNSDELLNVIGMAVKRKKEKHAGIGELEHMKNRPMILIDAPTSPPGRTRNRLSWHHAGLPSRPLPSKHLPGLLIPPFTTNSAATTHQHRFFSNSTRRNNSNNSNNNKSKNNNDNDVGEKNDNAAGPAPRLTHVTASGSAHMVSISDKTPTRRTAQAKCAVRFSSPLPLALIRDNQIKKGDVLAAARIAGIMAAKRTPDLIPLCHPIALTHAEVELVAPPPPPQPASSGAGDTDDDDDDGSSRVLEITATVSCDGKTGVEMEALTAASAAALTVYDMCKAVDKGMVIEGLRVVLKEGGRSGRWVEGDGSRG

SEQ ID NO: 3964 - DNA, 2490 bp, Myceliophthora thermophilia
atgtcggttccgcagagcaagcacgtcttccgcaacgtgcacgccttacgaggcgggaaacccgagctcggtgatctggcgctgaatgactaccatctcgttttccagtttcctcccgaatccgcgactaccgccgacccgcagttgaagaagcgggtcaggcaggcctggtttgcttttcatgtcataggccactgcacactgcggctgactgctcccgcgagcggtgtgccctcgtcgatacgcatccgtttccgggatttcacctttgtgtgtttcaattttgccgaggacaaacaggcccgggaggccttcgagttcatccgcgcgaggacgtgcaggctggggagcatagagaaccttctggccttcaactacactccgccgccaggttctcccgagaacaagatcaacggttgggatctgtacgatgcgagggccgaattcaggcggcagggtatcagcgagaagtcagcggaccttgggtggaggataaccaacatcaacaaggactataccttctccccgacctacccggccgtattagtggtgccgtccagaatctcggataacacgctcaagtacgctgccgcgtttcgctcccgcgcccggataccgacgctcagttacctccatcccgttaataactgcaccataacccgcagttcgcagccgttcgtggggcttcgggggaagcgcagcatccaagatgagcgcctcgtcggggcttgcttttctgcctctatggactctctcgatgtcgctctttccgccaacacggaccgcagcccgtcgtccagccacgtggatctgagcgccgagagcgcggattctgacgcgtcgttgtcagaaacggagcggatgcggatggaggacgagctcattgctggcaccaacgcgcagtacgacgaaaagacgggcaagcgactgatatacggtgcgcagcaacacaacctcatcgtcgacgcccggcctgcgatcaactcgtatgccatgcaggcgatagggatggggtcggagaacatggactactacagatttgccaagaaggttttcctaaatatagacaatattcacgtcatgagggattccctggaaaaggtcgtcaacgctatcaaggacgccgacatttcacccttaccccccaaccgagacctcctggccaaaagcaaatggctgaagcacattagcggcatcctggacggctcggctatcatcgcgcggcaggttggcatccagcattcccatgtgctcatccactgctcggacggctgggaccggacgagccagctgagcgccctggcccagctgatgcttgacccctattatcgcaccatcgacggtttcattgtcttggtcgagaaggaatggctctcgtttgggcacatgttccaattgcggtccggccacatgagtcacgagagctggttcaccgtggatagcgacgcgttggccggctcaacgatccgacccggcgagagcgagggtcggggagacgctatcgagagcgcttttgcaagcgcaaagcggctgtggaacaagagtatgggtaccgagaaagatacgccccccccagaagcggaggaatctttggcggcggacgactcgaagcagggttacgctcccattaccgaagatcacgccacgaggcccagggacgtgtcgcccgtctttcaccagttcctcgacgccacgtaccagctcctgcggcaacacccgacgcggtttgaatttaatgaacgcatgcttcggcgcttactctatcacgtgtactcgtgccaatacggcacctttctgttcaacaacgagcggcagcgccgcgaggcgaagctgcatgagcgcactcgcagcgtatgggcttactttttaagtcgccgccaggagttcactaacgaccaatatgacccgactatcgatgatcacataaaaggccgggagcggctcatcttcccgcggctgggcgaggtgcgatggtggtatcagcttttcaatcgcaccgacgacgagatgaacggcgacatcaatgcttctctcgccacagcagagcgcgttgcagcctatcaggccgcatcggggctgtcagagcctggtgttggtggtgaaaccgcaagcagccagtccgagaccgggtctggggactccgccagttcgtctcgcagcttgcaacctccgggattgacggcgagccagtccgttctcgcgggtgtcgagactgctcatgaggctctaacgccggaagctagggcgaccgcgtcgttgaatcgcagcgctagtacagccgggatgcctggtgccctcggagccctacaggataggctttccgggctggctattgggaagggtgtctttggaagtgctatgggaagttccagcacgggaaggaatcgaccgggtgcgcattcttccgaggctaatggctttgttggtgataagggtagccggaaaccgaaagaggaggacggagggcaagagatgaagagcattgactga

SEQ ID NO: 3965 - protein, 829 aa, Myceliophthora thermophilia
MSVPQSKHVFRNVHALRGGKPELGDLALNDYHLVFQFPPESATTADPQLKKRVRQAWFAFHVIGHCTLRLTAPASGVPSSIRIRFRDFTFVCFNFAEDKQAREAFEFIRARTCRLGSIENLLAFNYTPPPGSPENKINGWDLYDARAEFRRQGISEKSADLGWRITNINKDYTFSPTYPAVLVVPSRISDNTLKYAAAFRSRARIPTLSYLHPVNNCTITRSSQPFVGLRGKRSIQDERLVGACFSASMDSLDVALSANTDRSPSSSHVDLSAESADSDASLSETERMRMEDELIAGTNAQYDEKTGKRLIYGAQQHNLIVDARPAINSYAMQAIGMGSENMDYYRFAKKVFLNIDNIHVMRDSLEKVVNAIKDADISPLPPNRDLLAKSKWLKHISGILDGSAIIARQVGIQHSHVLIHCSDGWDRTSQLSALAQLMLDPYYRTIDGFIVLVEKEWLSFGHMFQLRSGHMSHESWFTVDSDALAGSTIRPGESEGRGDAIESAFASAKRLWNKSMGTEKDTPPPEAEESLAADDSKQGYAPITEDHATRPRDVSPVFHQFLDATYQLLRQHPTRFEFNERMLRRLLYHVYSCQYGTFLFNNERQRREAKLHERTRSVWAYFLSRRQEFTNDQYDPTIDDHIKGRERLIFPRLGEVRWWYQLFNRTDDEMNGDINASLATAERVAAYQAASGLSEPGVGGETASSQSETGSGDSASSSRSLQPPGLTASQSVLAGVETAHEALTPEARATASLNRSASTAGMPGALGALQDRLSGLAIGKGVFGSAMGSSSTGRNRPGAHSSEANGFVGDKGSRKPKEEDGGQEMKSID

SEQ ID NO: 3966 - DNA, 957 bp, Myceliophthora thermophilia
atggcggactcgaccccgtcacaccttgacccttccgccctcggcacaaaagaatactgggactcgctgtacgagaaggagctatccaaccacgccgagaacccgcgcgacgaggggaccgtctggttcgacgactcggacgccgaggccaagatggtcgcgtacctggacgagcacgccgaggcggaccacgcgctcgaccgcgccgccgccgccgtcctcgacctcggctgcggcaacggcagcctgctcttcgccctccgcgaggacggctggcgcggccgcctgctcggcgtcgactacagcgagaggagcgtcgagctggccaggcgggtcggcgtctcgaggcggagggccgcccgccgcggcggcggcggcgacaacctcgacattgcggttgaggaggaggcgagagcagaagaagaggggaagaaggagaccgggaaggaagaggaggacaaagtcaacgacgaggaggaggaggacgacgacgacgatacagaaagagaggtggagttcaaggtgtgggacgtcctcaatggatcgctcgccgacgtccgggctgcaccaccaacggccacgacggcggcgcagggaagcgagcagggccaagggtgggatctggtcctcgacaagggcaccttcgacgccgtctcgctcagcggcgagcgggatgacaaggggcggcgggtctgcgagggctacggcgagcgcgtgctccagcttctgcggacgggcgggatattcctcgtgacgagctgcaactggaccgagaaggaactgcgcgactggttcgagacaaagacaccgcccaccgcgacgggggagaggctgcggctggctgggaggatacagtatccgagcttcgagtttgccggtgacgacagacaaaaacaagagcccgcgacctccgcggagctcgtcggtcaattgtgccttgcgaaccttattccttaa

SEQ ID NO: 3967 - protein, 318 aa, Myceliophthora thermophilia
MADSTPSHLDPSALGTKEYWDSLYEKELSNHAENPRDEGTVWFDDSDAEAKMVAYLDEHAEADHALDRAAAAVLDLGCGNGSLLFALREDGWRGRLLGVDYSERSVELARRVGVSRRRAARRGGGGDNLDIAVEEEARAEEEGKKETGKEEEDKVNDEEEEDDDDDTEREVEFKVWDVLNGSLADVRAAPPTATTAAQGSEQGQGWDLVLDKGTFDAVSLSGERDDKGRRVCEGYGERVLQLLRTGGIFLVTSCNWTEKELRDWFETKTPPTATGERLRLAGRIQYPSFEFAGDDRQKQEPATSAELVGQLCLANLIP

SEQ ID NO: 3968 - DNA, 189 bp, Myceliophthora thermophilia
atgcaacctccaacccaagcaaaccacgatgaccgcaagctcggggatgccgactatatggtgccggatcccgatgccgcaagcctgaatgcgtctgagcgccaggggaagatcatcccggtggcgagagtgcgtcggtcatggccgagctgcatatccaagggggcgatgcggaccgatatcgagtaa

SEQ ID NO: 3969 - protein, 62 aa, Myceliophthora thermophilia
MQPPTQANHDDRKLGDADYMVPDPDAASLNASERQGKIIPVARVRRSWPSCISKGAMRTDIE

SEQ ID NO: 3970 - DNA, 3276 bp, Myceliophthora thermophilia
atggcccccccgagtcccgaaccgcagtcctcggcggaccctcccatccgccgcgaaggcgaagtcgtggtcgtgacggaccgcttggagaagccgtctctggacgaccggtcctaccgcgtcatccgcctcccgaaccagctcgaggcgctcatcgtccatgaccccaagacggacaaggcaagcgctgccatggatgtcaacgtcggaagcttcagcgacgaggacgagatgcccggaatggcccacgccgtcgaacatctcctcttcatgggcaacaagaagtacccggtggagaatgcttaccaccagtacatctcggcccattctggcctgaccaacgcctacacggcagcaacgtccacaaactaccacttcgaggtctctgccaagccgggcaaccaagaggagccctcggccacgaacccctcgccgctgctcggcgccctggaccgcttcgcccagttcttcatcgagccgctcttcctcgagaacacgctggaccgcgagctccgcgccgtcgactcggagaacaagaagaacctgcagaacgaccagtggcgcctgcatcagctcaagaagtcgctgtccaaccccaagcaccccttctgtcacttctccaccggcaacctggagaccctcaagacggcccccgagggccggggcatcaacgtgcgcgacaagttcatcgagttctacgagaagcactactcggcgaaccgcatgaagctctgcgtcctcggacgggagcccctggacgtcctgcagacctgggtcgtcgagcacttctcccccgtcaagaacaaggaccttccgcccaacaggtgggaccaagaggtgcccttcaccagggagctgctcggaacccagatcttcgccaggcccgtcatggatacccgcgacctcaccctcaccttccccttcatcgagcaggatcacctctacgactctcaaccgagccggtatattagtcatctcatcggccacgagggtcccggaagtatcatgtcgtacatcaagtccaagggttgggcaaacggcctgtatgccgggtcctggccggtcggccccggcactccagaggtctttgagtgtcaaattaccttgacagaggagggactcaagaactacaaggaggtcgtcaaggtcgtcttcgagtacattgctctcctgcgcgagacggagccgcaggagtggatctttgaagaacagaagggactggccgaggtcaacttcaggtttagggagaagacgcagtcgtaccgtttcacgagcaagctcagctcaaccatgcagaagccgctcccgcgggaatacctgctgagcgggtacagtcttttgcgcaagttcgacccgaaactaatcaaggagggcctcgattgcctgcgacccgacaatttccggatgaccatcgtatcgcgcgacttccccgggaaatgggacaagaaggagaagtggtacggaaccgagtacagctgccaacctatccccgacgacctcatggaggagatcaagaaggcggccgccagcgggccccagacccggacggccaagctgcacctcccgcacaggaacgagttcgtgccgaccaagctggaagtcgagaagaaggacgtcaaggagccggcgctggcaccccgcatcgtcaggaacgaccccctcgtccggacctggttcaagaaggacgacaccttctgggttcccaaggcgaccctgatcatcagctgcaggagcccggtagccaccgcctcggcggcggggcgggtgaagtcccgcctctttaccgatctcgtcaaggacgcgctcgaagaattctcgtacgatgccgagctggccggcctggagtacaccgtaaccctcgactcgcgcggcctgtacatcgaggtttcgggctacaacgacaagctagccgtcctgttgcagcacgtgctcgtcaccactcgcgatctcgagatccgcgacgaccggttcgctatcatcaaggagcgcatcagcagagggtaccggaactgggagctctccgcgccctggactcagatcggcgactacatgtcctggctgacggtcgaccaaggctacgtggtcgaggagctcgaggccgagctgccttacatcaccgccgacgccctccgcgtcttccacaaggagctgctctcccagatgcacatggagatcctcgtccacggaaacgtctacagggaggacgccctccggctgacggatatggtcgagtcgacgctgaagcctcgagccctcccagaggcccagtggaagatccggcgagggctgatactcccgcccgggtctaactacatctggaagaagaagctcaaagacccggccaatgtcaaccattgcatccagtatttccttcacgtgggctcgagggatgactacaatgtccgggcgagggtgttgctcctggatcagattgtgcacgagccgtgcttcaaccaactccgcaccaaggagcagctcggctacatcgtctattcgggcacctggaccagcgtcacgcagtacggcttctactttgtcatccagagcgagaagacggcaccgtatctggagaccaggatcgaagagttcctcaagaccgtggccacgatgctggaggagatgagcgaggaggagttcgaaagcaacaagcgcagcattattgacaagcgtctagagagactcaagtacctggagcaagaaagcaacagacattggacccacatccactccgagttctatgctttcgacaatgctccccaggacgcggatcacatcagaccgctcaccaaggcggacatgattgagtttttcaacgaatatattcaccccaactcaccatcaagggcgaagctggccgtttacctcgaggcccaggccaagagcgacgtatcaaccaaggagatttctgaactgatcaagacgctggaaattgatgaagcagcttctgccaaagcggcctccgacctgcaggctcggctgagcgcggccgaccacgacgtagagaaggaggtcgccggtctccgggactatctcctccacgatttgaaggtacctgaaggcaagatagacgcggcatccgaggcgtggagggaaatccatgccaagcacggccccggaaacgatgtggtcaaggacgccgagcctccttcagcaaacggaacgacgccggtcttcattgacgatgtcaggtctttcagggccagtctccccgctagcaatggggcgaaacctctgaaagaccttagcgtgtatgaggatttggaagcaaaactctga

SEQ ID NO: 3971 - protein, 1091 aa, Myceliophthora thermophilia
MAPPSPEPQSSADPPIRREGEVVVVTDRLEKPSLDDRSYRVIRLPNQLEALIVHDPKTDKASAAMDVNVGSFSDEDEMPGMAHAVEHLLFMGNKKYPVENAYHQYISAHSGLTNAYTAATSTNYHFEVSAKPGNQEEPSATNPSPLLGALDRFAQFFIEPLFLENTLDRELRAVDSENKKNLQNDQWRLHQLKKSLSNPKHPFCHFSTGNLETLKTAPEGRGINVRDKFIEFYEKHYSANRMKLCVLGREPLDVLQTWVVEHFSPVKNKDLPPNRWDQEVPFTRELLGTQIFARPVMDTRDLTLTFPFIEQDHLYDSQPSRYISHLIGHEGPGSIMSYIKSKGWANGLYAGSWPVGPGTPEVFECQITLTEEGLKNYKEVVKVVFEYIALLRETEPQEWIFEEQKGLAEVNFRFREKTQSYRFTSKLSSTMQKPLPREYLLSGYSLLRKFDPKLIKEGLDCLRPDNFRMTIVSRDFPGKWDKKEKWYGTEYSCQPIPDDLMEEIKKAAASGPQTRTAKLHLPHRNEFVPTKLEVEKKDVKEPALAPRIVRNDPLVRTWFKKDDTFWVPKATLIISCRSPVATASAAGRVKSRLFTDLVKDALEEFSYDAELAGLEYTVTLDSRGLYIEVSGYNDKLAVLLQHVLVTTRDLEIRDDRFAIIKERISRGYRNWELSAPWTQIGDYMSWLTVDQGYVVEELEAELPYITADALRVFHKELLSQMHMEILVHGNVYREDALRLTDMVESTLKPRALPEAQWKIRRGLILPPGSNYIWKKKLKDPANVNHCIQYFLHVGSRDDYNVRARVLLLDQIVHEPCFNQLRTKEQLGYIVYSGTWTSVTQYGFYFVIQSEKTAPYLETRIEEFLKTVATMLEEMSEEEFESNKRSIIDKRLERLKYLEQESNRHWTHIHSEFYAFDNAPQDADHIRPLTKADMIEFFNEYIHPNSPSRAKLAVYLEAQAKSDVSTKEISELIKTLEIDEAASAKAASDLQARLSAADHDVEKEVAGLRDYLLHDLKVPEGKIDAASEAWREIHAKHGPGNDVVKDAEPPSANGTTPVFIDDVRSFRASLPASNGAKPLKDLSVYEDLEAKL

SEQ ID NO: 3972 - DNA, 5589 bp, Myceliophthora thermophilia
atgatacagaggggggggtgtccactggctagctcccgggctgcttgtgcgagcacggctgtggagcgaggaacggcgcctgcgcatgctgacgccgtgcttcgccgctcgcctctgaccgcgggtctgtttgttggtcctggttcgacgaatgcaccgcacaggcttctcttacacccagactttaatccgctcggcttagtgcccccctccgtgactgccgtcactgccagctcgcttgtgccagtgcctggtttccccaacgaacaccagcacctggccacttcttccgccgtcttcgccgcccaccttgcctcgcctttcaccacgtcttccctaaagaaacggaggattacccgccagtcgaccagggagcacaacaagcccgaggacttggtgctgccctccaccgaagtagacaccgatcccgccttctccttctctgccgcctccgtctctggcctgagcacgccttctgccttgccccgtgccgactcgctgcctccgtccggtgtgccgccccgccttcaaagccagggcgcctccattgccgattccccgtcttccgccgcgagctctccctgtgctggctcggccgacctgtcgaccgagctcgaccgggatcccgacctcgtcgacggctcgaccttgcagctgccggaacacggacacggaccggcaagggatcagtcgcccgttcaccaatacgtccgccgagctctaatggggggtgccgccgattctccccatcggtcctcctctcccctcaagcgccgagcacccagcatggaaccagagcagaacgttgcggaagggagggaggacgtggatatgctcacaatcacggaatctcaaaggacagaaacggcagatgggccgaaagaagagcagggcaaccaggaggagactgaggccccagaaaatcctccgcccgacaaacaggcagagctgcccttacgaaatggtaatgccacgccgccaccgcctccgcctccgcctccaccgccgcgacattctcgcttaccatcttgcgctgactgtgtgaggacagacatcccgccgctcgaccaacaaatcaagacgatcgagaccctcgtgcaggcctttgctgagacccccgtgaaggagggcgacgaggcatatctcgtgtctcggaaatggctcgccaaagctcaggcatgtcgttcggatgcaaagcacgccagcaaggaatcctcagacgggtcacccgggccggtcgacaactcggatatcatccaagccatcttcacagactccaccggcgagcgctgcgtcaagctgaaacccggcacgggcattgaggatttcgagctctttccaaaggacgcgtgggatctcctcctttcgtggtacggcttggctgccggccagtcgcccattgtccgggtcgcacacaacacggcaccagactccgtgagcatcccgaccattcagttcgagttccatcctccggtgttcaccatccaccggatgtggtctgcgaacagtcccattccgattgaacaggaagtcaagctcaagaagcctgcgccccccgtcatagtccaaagcacatcctctagttaccacaaattcttgaagcaggccaagaagcttgttggcgtggctcccgacaggaaagttcgcgtgtggaggctgctccagaccattccagccacagagcccacctcggagccgtcggggatcaagacgccgccagattcacccggccgtggtcacggagttctcactcaggctccatctacccccggcgcctggcccgaaatgcttgtcgacgtggcaacgttcttgaccctggagaaggacgtcgaacgcggcctggttgacagcgaggacaccactactaatcctaactacaacggaaggaagaacctggcgttagtaggccttgctgttgaccagacgcttgttctggatgagcagattgatcgtgacgccttcgtctccaactatcgaggcggcaccgtcaaggatagagctctagcggcccgaagcagctcgacaggcctcgtggcgcaacgcggtaatgccagcggacgcagcagtcccgcacctcagggggccctcacaaggggccgggcgcagcaaaagccagggcgcaccttgggctgcgtcggtttgcagaatctgggcaacacgtgctacatgaactcggcgctgcaatgtgtgcggagcgtcgaagagctcacaaaatacttcctcacacacgaagcgcagaaggagatcaacccggacaacccgctctctcacaatggcgaggttgctgccgcctatgggcgcctgctggaggagatctacagggaccctgctcccggctccatcgccccacgccatttcaaagctgtcatcgggcggtatgcgtcggccttttccggatacggccagcaggactctcaggagttcctcggttttctcctcgacgggcttcaagaggacttgaaccgcatcaagaagaagccctacatcgagaagcccgactccacagacgatatgatcaacaatccggaggcggtccgcgagatggcagccaaggtctgggacatcaccaagaagagagacgactcggtcattgccgatctcttcaccggcatgtacaagtctaccctggtgtgtcccgtctgtgacaaagtcagcatcacttttgaccctttcaacaaccttaccctaccgcttccggtggccaatgtctggtctcgtagcgtcaagttctttcccctaaacgatgtgcccgtcgagattgttgtcgacctcgacaagaacagtagtatcagggctctgaagcagtacattgccgtgcgggtcggggtgcccgctgagcgcctctttgcgggcgaagagtttcactccaagttcttcaagttctacgatgacgggtccgcagtctctgacgagatccagtcgagcgatgtcgccgtcgtgcacgagatcgaggcagcccctactaatgtttacggccccaagaaacagctggcgctcaacggccggctggcgtcaccgtcgcaagacgaggacgattcctctccggtcgaggatccccgactggagcgcatgctcgtcccagtcctgcaccgcatcgatccctcggatccttcggccaggaagcgttatgtgcgcaagagcgacaccgcccttcctccgccgcacttcatcgtcctaacgccggaggaggcgcgtgacttggaggccatccgccgcaagatcctggagaaggtcgccaccttcacgacttggtccaagctgtcggctcccgaggacacggatgtggccgagggcacggactcggagatggtgaacacgactgtgtccgatgcagattccgcgggcgattccaaggtcgttgccaagtcggtggaaggagaggacgacatggtcgacgttactatgcgtgacgcctctgatgcgcgtaacaacacctccgccgctacgcccgtcgaagagacaccaaaggttctgaaacgtttcaataagaggcggcccaagtgggttaaccctgtcgagttcttggatcccgagctgcaaaatctgtttgacatgagctacttctacgagtcgggcacaaccgtccccaccggctggacttccactacggatgaaggcgttttgccgcggctgagctccaggctgcctagggtggccgcctcggacatcgagatgcagagccccgcaaccctggatggttccgacgagagtggcagcgagggatccggtagactgccggccactgttgtcactcgcatggccgaggagtctagcgacgaggactcggagttcacgaggcacaagaacttccactcacggccaggcaatcaatttaacggccgcaagagaggtgggaagcacaagacttacggaaagggtaagggccgtttcaacaagcaaaatcgactttcccgcggcaagcagccggcggcgcagccggcggccgtcgagatgcccgaagagtcccttcccacgggcgctctggtcggcctgggcgagggtatcgtagtcgagtggagcgaggctgcctttgacctcgtcttcggtggcgcaacgcccgatgagatgcggggtatgaaaacgtatctcaaggttccgacgttggaagaccccggcctgcaggcaaagcagaaagcgcggcagttgcgtaagaagcatggtatcgccctcgacgactgcctggacgagttcgagaaggaagagattctctcggaacaggacacgtggtactgtcctcgctgcaaggagcatcgccgtgcgagcaagaagttcgacctctggaagacaccggatatcctcattgtccacctcaagcgtttcagttctagcgggtggaggcgggacaagctggacattctcgtcgacttccccgtggagggtctcgatctcacaaagcgcgtcatcaataaagaggagggaaaggaggaagttttcgacttgatcgccgtggacgaccattggggcggcctaggcggcggccactacacggcctttgccaagaattttatcgacggcgagtggtacgagtacaatgattcttcggtcagtaaacagaaagacacctctcgcgtggttacctcggcagcgtatctcctgttctaccgtcgccgctccaaggtccccttgggcggtcccaggttccaggagatctccgaccgtttcaaccagtccgccctccgtgatgacgcgtcggattcgggggaaggcgagcgtctcggccaaggctcctcccagcgtggatcgccgagcgctttgaccggagccggtccagctctccttcgggaaagtcgtggttgggataatagtggtagacgtgctgcgtcggagcggccgtcgtaccggggcggcaacaacgacgacgacgccgacatgggtacgacctggagtaaccaggacactctgcacaacagcattgagggtgacggcgaggatgaagggatcggcctgtcagactacgacaccgcgggtatggcgggcatgacctccatcattgggcctaccagttggagtttcggcaatctcgtcgagggcagcaagcccggttccgaggttggcggtggcgacgacattgccagcgacattgcgcagaatgacggatcgtcggtccaaggcgacatgaccgacgtgttcgacgatgcttcggggatggagcacctgctctcgcgggatcccgaagccgactatgttggcccgcccgagccgacagcgccggttgtcgggtttgtgggcgacgacgagtacggcatcccgccgccgccgtcggcagcggaccaagagttgatcggcaagcttgccgagcaggcgtgggtcgatggagaggtccacaaagtccctcctgtgggtgatctcggcgtgatcgaagacgatcaggcgagcgacaaggttgccgagatccatgtcgacgatccggagatggaagaccaaacgacggcggctgctgctgctactgctgctgctgcgccggaggctacgcctacgaaggaggccgatgactccggagtggcgtgctacgaacggattgggagcctgatcgtgcccggcaagcgggcgctgaaggatggcagtggatggggtcgtcttcgattatga

SEQ ID NO: 3973 - protein, 1862 aa, Myceliophthora thermophilia
MIQRGGCPLASSRAACASTAVERGTAPAHADAVLRRSPLTAGLFVGPGSTNAPHRLLLHPDFNPLGLVPPSVTAVTASSLVPVPGFPNEHQHLATSSAVFAAHLASPFTTSSLKKRRITRQSTREHNKPEDLVLPSTEVDTDPAFSFSAASVSGLSTPSALPRADSLPPSGVPPRLQSQGASIADSPSSAASSPCAGSADLSTELDRDPDLVDGSTLQLPEHGHGPARDQSPVHQYVRRALMGGAADSPHRSSSPLKRRAPSMEPEQNVAEGREDVDMLTITESQRTETADGPKEEQGNQEETEAPENPPPDKQAELPLRNGNATPPPPPPPPPPPRHSRLPSCADCVRTDIPPLDQQIKTIETLVQAFAETPVKEGDEAYLVSRKWLAKAQACRSDAKHASKESSDGSPGPVDNSDIIQAIFTDSTGERCVKLKPGTGIEDFELFPKDAWDLLLSWYGLAAGQSPIVRVAHNTAPDSVSIPTIQFEFHPPVFTIHRMWSANSPIPIEQEVKLKKPAPPVIVQSTSSSYHKFLKQAKKLVGVAPDRKVRVWRLLQTIPATEPTSEPSGIKTPPDSPGRGHGVLTQAPSTPGAWPEMLVDVATFLTLEKDVERGLVDSEDTTTNPNYNGRKNLALVGLAVDQTLVLDEQIDRDAFVSNYRGGTVKDRALAARSSSTGLVAQRGNASGRSSPAPQGALTRGRAQQKPGRTLGCVGLQNLGNTCYMNSALQCVRSVEELTKYFLTHEAQKEINPDNPLSHNGEVAAAYGRLLEEIYRDPAPGSIAPRHFKAVIGRYASAFSGYGQQDSQEFLGFLLDGLQEDLNRIKKKPYIEKPDSTDDMINNPEAVREMAAKVWDITKKRDDSVIADLFTGMYKSTLVCPVCDKVSITFDPFNNLTLPLPVANVWSRSVKFFPLNDVPVEIVVDLDKNSSIRALKQYIAVRVGVPAERLFAGEEFHSKFFKFYDDGSAVSDEIQSSDVAVVHEIEAAPTNVYGPKKQLALNGRLASPSQDEDDSSPVEDPRLERMLVPVLHRIDPSDPSARKRYVRKSDTALPPPHFIVLTPEEARDLEAIRRKILEKVATFTTWSKLSAPEDTDVAEGTDSEMVNTTVSDADSAGDSKVVAKSVEGEDDMVDVTMRDASDARNNTSAATPVEETPKVLKRFNKRRPKWVNPVEFLDPELQNLFDMSYFYESGTTVPTGWTSTTDEGVLPRLSSRLPRVAASDIEMQSPATLDGSDESGSEGSGRLPATVVTRMAEESSDEDSEFTRHKNFHSRPGNQFNGRKRGGKHKTYGKGKGRFNKQNRLSRGKQPAAQPAAVEMPEESLPTGALVGLGEGIVVEWSEAAFDLVFGGATPDEMRGMKTYLKVPTLEDPGLQAKQKARQLRKKHGIALDDCLDEFEKEEILSEQDTWYCPRCKEHRRASKKFDLWKTPDILIVHLKRFSSSGWRRDKLDILVDFPVEGLDLTKRVINKEEGKEEVFDLIAVDDHWGGLGGGHYTAFAKNFIDGEWYEYNDSSVSKQKDTSRVVTSAAYLLFYRRRSKVPLGGPRFQEISDRFNQSALRDDASDSGEGERLGQGSSQRGSPSALTGAGPALLRESRGWDNSGRRAASERPSYRGGNNDDDADMGTTWSNQDTLHNSIEGDGEDEGIGLSDYDTAGMAGMTSIIGPTSWSFGNLVEGSKPGSEVGGGDDIASDIAQNDGSSVQGDMTDVFDDASGMEHLLSRDPEADYVGPPEPTAPVVGFVGDDEYGIPPPPSAADQELIGKLAEQAWVDGEVHKVPPVGDLGVIEDDQASDKVAEIHVDDPEMEDQTTAAAAATAAAAPEATPTKEADDSGVACYERIGSLIVPGKRALKDGSGWGRLRL

SEQ ID NO: 3974 - DNA, 1935 bp, Myceliophthora thermophilia
atgccacattccgagagggtaggcgagcgacgcccttctcactcgaagggcaaccgtcttgcaggttttttctccaagtcaaaagagcaagcagcggcccatcacgcagtagcatcgcaaccaacggcggcatcaccaagccctcttccaacaatctccttgtccgccgctgccggtgaagaactcgacaccgatgagacccccactaccttattcgaacctccctctgccgacgaggcaaagaagcaggaacgctttgaagctcagttcgctcccttgctcgacaagagccacctctatgtcagcgcccaccagggcaagccgctcgaggctcccgtcatcgatgagccgccttactattacgtccttaccacatacctcagctatctcctcttgatctttttcggccatgcgcgggactttttcggcaagagatttggaaacaagaagcactaccagacactgaaggttcacgatggctacgccccactcaacgacgattttgacagcttctatgtcaggaggctaaagctccgcatcgacgactgcttcgcaaggcccacgactggtgtccccggtcgctacatcacccttatcgaccgcaagtcggacgattataaccgctcttacaagttcacgggcacctacacgcagactctgaacgtgagctcgtacaactacctcggtttcgctcagtcggagggtccttgtgccgacgccgtcgaggaatgcgtccgcaagaccggtctgagttttgccagcccgcgtgccgacgccggcacctcggaattggtgctggaggtcgagcgtgaggtggccaagtttgtcggcaagcctgcggctatggtgttttcaatgggtttcgtgacgaatgcgggctccttcccggcgctcgtctccaagggctgtctcatcctctcggacgagctgaaccacgcgtcgatccgcattggcgcccgcctttccggcgccgtgatccggtcgttcaagcacaacgatatgcaggatctggagaagaagctgcgcgaggccatctcccagggccagccgcgtacccaccggccctggaagaagatcctggttgccgtcgagggtctttactctatggaagggaccatggtggatctcccgggcgtcctggcgctcaagaagaagtacaagttcttcctgtacgtcgacgaggctcacagtatcggagcgcttggcccgagaggacgtggtgtctgcgactacttcggcattgacccggctgaggtcgacattctgatgggaaccctgaccaagtcttttggtgccaatggcggctacgttgcggctgagaagcacattatcgacgggctcaggatgaccaacgcggccacccttctgggtgaatccccaacccccccggtcttgatgcagattctcacctccctcaagctgatcacgggcgagatttaccccggccagggcgaggagcgcttgcagcgcctagccttcaactcgcgctatctccgtctcgggctcaagcgcctcggctttatcacttacggccacgacgactcgcccatcatccccattgtgctgtacaacccgggcaagatgtcggctttcagccacgagatgctcaagcgcaagatttcggtcgtcattgtcggctacccggccacgccgctcatcagctcgcgcgcccgtttctgcatctcgtctgctcacaacaaggaggatatggatcgcatcctggccgcctgcgacgaggttggcgacatcctgcagctcaagtactcgaccggtattgccggtggcctcgagccgctgcccgacggcgtcacgcccgagacggagcaggagtggcgccgcgcgaatggcttcgtgggcgtcatcaagccgccgaggtggaagctggaggatgttcttgcccgtggcgtggaggacgccaagaagccgcttcgttaa

SEQ ID NO: 3975 - protein, 644 aa, Myceliophthora thermophilia
MPHSERVGERRPSHSKGNRLAGFFSKSKEQAAAHHAVASQPTAASPSPLPTISLSAAAGEELDTDETPTTLFEPPSADEAKKQERFEAQFAPLLDKSHLYVSAHQGKPLEAPVIDEPPYYYVLTTYLSYLLLIFFGHARDFFGKRFGNKKHYQTLKVHDGYAPLNDDFDSFYVRRLKLRIDDCFARPTTGVPGRYITLIDRKSDDYNRSYKFTGTYTQTLNVSSYNYLGFAQSEGPCADAVEECVRKTGLSFASPRADAGTSELVLEVEREVAKFVGKPAAMVFSMGFVTNAGSFPALVSKGCLILSDELNHASIRIGARLSGAVIRSFKHNDMQDLEKKLREAISQGQPRTHRPWKKILVAVEGLYSMEGTMVDLPGVLALKKKYKFFLYVDEAHSIGALGPRGRGVCDYFGIDPAEVDILMGTLTKSFGANGGYVAAEKHIIDGLRMTNAATLLGESPTPPVLMQILTSLKLITGEIYPGQGEERLQRLAFNSRYLRLGLKRLGFITYGHDDSPIIPIVLYNPGKMSAFSHEMLKRKISVVIVGYPATPLISSRARFCISSAHNKEDMDRILAACDEVGDILQLKYSTGIAGGLEPLPDGVTPETEQEWRRANGFVGVIKPPRWKLEDVLARGVEDAKKPLR

SEQ ID NO: 3976 - DNA, 1080 bp, Myceliophthora thermophilia
atggatccaggccggtcgagcgacgtgtcgccagaggcgatgcaggcacgcatccaacaggcacgtcgcgaggctgagacgctcaaggacaggatcaagaggaagaaggaggagcttgcggacacgacgctccgcgcggtcgccgcccaggcccacgaaccgatccccaagagccaactgatgaggacgaagaggacattgaaagggcatctcgccaagatctacgctatgcactggtcgaccgaccggaggcacctcgtttcggcatcacaagacggaaagctgatcatctgggacgcgtacacgacaaacaaggtccacgccatcccgctgcggtcgtcgtgggtaatgacatgcgcctacgcaccgagcgggaactttgtcgcctgcggcggtctcgacaacatctgctccatctacaacctcaaccagaaccgcgacgggcccacgagggtagcgcgtgagctgtccggccatgccggctacctgtcgtgctgccgcttcattaacgaccgcagcatcatcacctcgtcgggcgacatgacgtgcatgaagtgggatatcgagaccggcaccaaggttgtcgagttcgccgaccacctgggagacgtcatgagcatcagcctcaatccgaccaaccagaacacgttcatctcgggcgcctgcgatgccttcgccaagctctgggatatccgcgccggcaaggcggtgcagacttttgccggccacgagtccgacattaacgccatccagtttttcccggacggccactccttcgtaacagggtccgatgatgctacctgccgcctgttcgacatccgcgcagacagggaactcaacttctatgggtccgaatcgatcctgtgcggcattacctcggttgccacctccgtgtctgggcggttgctttttgctggttatgacgatttcgagtgcaaggtttgggatgttactcggggcgagaaggtcggctcgctcgtgggccacgagaaccgtgtcagctgcctgggcgtgtccaacgacggcataagtttgtgcacgggttcctgggatgctttcctcaaggtgtgggcctattga

SEQ ID NO: 3977 - protein, 359 aa, Myceliophthora thermophilia
MDPGRSSDVSPEAMQARIQQARREAETLKDRIKRKKEELADTTLRAVAAQAHEPIPKSQLMRTKRTLKGHLAKIYAMHWSTDRRHLVSASQDGKLIIWDAYTTNKVHAIPLRSSWVMTCAYAPSGNFVACGGLDNICSIYNLNQNRDGPTRVARELSGHAGYLSCCRFINDRSIITSSGDMTCMKWDIETGTKVVEFADHLGDVMSISLNPTNQNTFISGACDAFAKLWDIRAGKAVQTFAGHESDINAIQFFPDGHSFVTGSDDATCRLFDIRADRELNFYGSESILCGITSVATSVSGRLLFAGYDDFECKVWDVTRGEKVGSLVGHENRVSCLGVSNDGISLCTGSWDAFLKVWAY

SEQ ID NO: 3978 - DNA, 3945 bp, Myceliophthora thermophilia
atgtcgctgaatgggttggacgatacacgagtcacggaggcgtacgaggccgcggtcgccgaacccggaggatggctcttgttgaaatatgccagtcgtgatgaggtcgagctgctgggtcggggcaatggcggcatcgtcgaaatccgcaacaatattgcccagtacgaggacaagtcgccgctctacggtttcctgaggtacaggcgtcgcagtgtcatcatcaaatacctgcccgtggactgctccaggttgatccaagcgcgggtgactgttcacttcgaggccgtctgcgaccgattctcccctcacgatactacctttgagatctcagaggcgaaggagctcaaggacaccaagctctcggcagcctgctcgcttcatgctgcgtccgggtcgacatcctcctcgacgagctcgctgcgtcgaagacgcttgatggaaatcgcagaagaggaggaggaagaggagagagagagaaagcgccagtccgtcgccaaagaagaggcacgcccgaagtcgtccgcagcgcactcggaagcccctgttaagctcgatgcagacctggccaatctcccggatgcttcccgcttcgctaatgaactcgaaccgccaaatttcacgggtgcccagcgtccatcctcgcccgccatatccgtagacgagtcttcgcggcgcatgtcatcgcagtcgtcgcggactgacctctatccggcgacctcttacccctattccaagccacgagttaagattggtccaagaccctcggcggatcctgccggtcgcccgcgatcatctgctagtggctccgctccccgtgtctcgacggtcccggctggcatcaagtccatgtccaaaggcaccaggaaggctcgctctcaatcccagggccacggcgaagaagctcccgagtctccgagtcaagaacgagctgaattcatttcccagccagtcgaggccgttgctggcgcgaagccctccggaagtgtttcggcccaaccacaggccaccagcgcaaccgaagaagccccggccgacacgagtgctgcgcacaagcccgacgcacccgccattgcccaacccccggcaaagcagaacgtcatgacgcccgagaaagctcggctattgaaagctatgaagctgagagagcaaaagaagatgatgagcctgcagacaacacccgacgttcctagtgccgatgtcccttcggctcagagcaccccgggccttgccaacgagaagcaggatgttgaggcagccgcagacgctccgctacctgaaggacgcccggacaaagcggacgagcagcaggaggaagttcctgagacgcccaaacctgattccgcgatggatattgggacggatcacgcctctctagataccaccttggactctcacccctcgtctcccacggccgcctcggaaattggaggttccacgcaagcttcgtccctatccgactcaacgaacgaaaccgttcttgctaaagaggaacgcgcgaacaacgaatcggaagcaagtcaagccaaggatgacgggcagccggaatcggctcaacgtgaagccctgccctcggaggagcgcgccgatggaacggcctccgcgttacccgacagacagtctcaagcaaccatcacggtgcctaatgacgggtttcctgcggctgcggaggagaaagtcgaagtgcaaaccgtctccagcacggcagcgagtgacgacgccgtcccaaagggtttgccggtctcggcatcatccgagtcgccagcccagtctagcacgcccgaggacaaggcggccgacggaacagcggccgagacagtcgaggagccagcatctcttgcgaaattgccagaggcgaagcttagcgatgccgaacctatcggtgacgaaagaacccccttaacacagcagatccgaatcccggtgtccaagttctccacgcaggagacgaggcctcccacgagctctgctagccaaggtctccccctcattgccgctaatacctcggatgtggattcgtggcgcgttaaggaatcagccccccctgttccggagaaggacactgtcaccggggcaaccaacgtcagcgatgcggtcgatgtcgactccaagctgcggaagcttccggaacgtatccggacgaacctcgatgtcctggacagcagcgacaagcggcgctccgtcatcagcatcacagataacgacggctttatggatgagttgcagtcggcgacagttcagcaggctacgccagtcactgtgtccaagtctcccatttccccggtctttggtgtggaccagaccaacaagccggctagcgccgcggcggacaataccgcatccgcccctaagtttttgaggacggcctcgaatcccgtccgcaattctttcctagccccgagcgagttggcgtctccccctgcccgatcagcgtcgtctggctccgcttatatgcagagggtttcccaacagcagcagcagcagcaaccgtcgtcagagctcagacccaagagcgccaagttgggttcaagtatctcgcagcgaatcaaagcgctggagaaactgtctggcggcggccccggcggggagcaggtgaacacaccaaaagagcgccctgcgacaaccttctttgccgtgcgcaaagctaatgttcgggagggctcacggccatcttccgtggccgagcggaccagttcgctttcgaggggcgcatcaccctctcctccagcatcgagggactcgtcatctcccgaggccacccggaacatgggacgcggccggtccggatcgctggtgaaccggttgtccatgtttgagggaggaatgcctcccagggggcgccccgaatccgtccaggtcacagctcgcatcgttcgggatcctaaccaaccataccctaggggccccgagcccagggcaagccaagcagattatccgccgctagacttgaggcagtcacagctgacggtggacgttcagaaccgcgtcaactcgcagagccccgtgcgtccggctagtgttgtttcggcgcgggagctcgcggatcaggccaagcagacgttgctggagcgacgactatccaagcagtcgcgagagggagacagagacaccacaacgacggaaacatctgacggccctcgtccccgacgacggtcgtcgctctcgttcgttaaagacttcatcaaggaccggactgagtctattattggtgtcaagtcgccgtctacggataacctcggcaacgcgctctctcccgctgctgccgccagccaggcttctgcaggctcgcgcccctcatcccatgctccatcggtgcaacagtccacttcgctaggccgacgtcttagcattagcagccggcgctcatcgctcgaccagagcggctccggcccttctgtcagcatgacatcccctggcgccgagtcggaagctgaagccaagagcggcaaccagtcgcgcttcccgctcgtgaccggaaggaagaatggcgccccgtccatctcacccacggtgaccgaggagaacgccgctgaggtcgaggccgcgtccaagggtagtacaggcgctactggcgctgcggcccagccgagcattattgccttcatgggtgatgtcaacgtccagttcccggacaatctcttgtggaaacgtagaagcctctgcctcgatagtcaaggcttcctgattttgagcgcgggacagggcacggccatgatacctcctgtttccggcaaggacagacacggcgccatggtcaagcgataccacatgagcgacttcaagcccccttttgcgcccgacgtggaactgcaggagctgcccaacagcgtcgttctcgacctggttgatggcagcggactgcagattgcttgtgaggaccgggcgggccagatgaacgtcctgcgcattcttgaggaagcacaccgcaacttcgccaactattga

SEQ ID NO: 3979 - protein, 1314 aa, Myceliophthora thermophilia
MSLNGLDDTRVTEAYEAAVAEPGGWLLLKYASRDEVELLGRGNGGIVEIRNNIAQYEDKSPLYGFLRYRRRSVIIKYLPVDCSRLIQARVTVHFEAVCDRFSPHDTTFEISEAKELKDTKLSAACSLHAASGSTSSSTSSLRRRRLMEIAEEEEEEERERKRQSVAKEEARPKSSAAHSEAPVKLDADLANLPDASRFANELEPPNFTGAQRPSSPAISVDESSRRMSSQSSRTDLYPATSYPYSKPRVKIGPRPSADPAGRPRSSASGSAPRVSTVPAGIKSMSKGTRKARSQSQGHGEEAPESPSQERAEFISQPVEAVAGAKPSGSVSAQPQATSATEEAPADTSAAHKPDAPAIAQPPAKQNVMTPEKARLLKAMKLREQKKMMSLQTTPDVPSADVPSAQSTPGLANEKQDVEAAADAPLPEGRPDKADEQQEEVPETPKPDSAMDIGTDHASLDTTLDSHPSSPTAASEIGGSTQASSLSDSTNETVLAKEERANNESEASQAKDDGQPESAQREALPSEERADGTASALPDRQSQATITVPNDGFPAAAEEKVEVQTVSSTAASDDAVPKGLPVSASSESPAQSSTPEDKAADGTAAETVEEPASLAKLPEAKLSDAEPIGDERTPLTQQIRIPVSKFSTQETRPPTSSASQGLPLIAANTSDVDSWRVKESAPPVPEKDTVTGATNVSDAVDVDSKLRKLPERIRTNLDVLDSSDKRRSVISITDNDGFMDELQSATVQQATPVTVSKSPISPVFGVDQTNKPASAAADNTASAPKFLRTASNPVRNSFLAPSELASPPARSASSGSAYMQRVSQQQQQQQPSSELRPKSAKLGSSISQRIKALEKLSGGGPGGEQVNTPKERPATTFFAVRKANVREGSRPSSVAERTSSLSRGASPSPPASRDSSSPEATRNMGRGRSGSLVNRLSMFEGGMPPRGRPESVQVTARIVRDPNQPYPRGPEPRASQADYPPLDLRQSQLTVDVQNRVNSQSPVRPASVVSARELADQAKQTLLERRLSKQSREGDRDTTTTETSDGPRPRRRSSLSFVKDFIKDRTESIIGVKSPSTDNLGNALSPAAAASQASAGSRPSSHAPSVQQSTSLGRRLSISSRRSSLDQSGSGPSVSMTSPGAESEAEAKSGNQSRFPLVTGRKNGAPSISPTVTEENAAEVEAASKGSTGATGAAAQPSIIAFMGDVNVQFPDNLLWKRRSLCLDSQGFLILSAGQGTAMIPPVSGKDRHGAMVKRYHMSDFKPPFAPDVELQELPNSVVLDLVDGSGLQIACEDRAGQMNVLRILEEAHRNFANY

SEQ ID NO: 3980 - DNA, 5508 bp, Myceliophthora thermophilia
atgggttctttaaaacgcaaagagggccccaacggcgcctcggcctcgaaatcaaatcgagccgcccccgagtcgcggccctcgaaacgggcgaaagcgagtgagtcggcgaaggcgaaggacgacagcaataagggggcaaaggagtccaagcccccggcgaagccgcctgccactaccgtgatctcgaaaccaaaggaggaagagcccttgtttccgcgaggcggcgggagcgtcctgacgcccctcgaacagaagcagatctcgatccaagcgaggaaggatgtcttgttcgaggagcagtccgagagcaagaagggagacaaggcggccaagaagaagaggcgcaagtcgcaggtcgatgcgacggtggcaaaagccaccaaggatgaggatgcggtcaaggtggaaagtctgaatttcaagcgattggtcaagggctcactggtcctcggaaccgtttgcgccatcaaccccctcgacatcgccgttgccctcccgaataaccttgtcggtcatgtgcccatcacctccatatccgagtctttgacgcagcgactccaggagagtgctgagaaggaggaggcggaggaggaggaagaagaagaagaagaggaggagggaggcgggtccggtgaaaggggtgccgacgacgttgacctgaacggcttattctacatcggccagtacgtgcgcgcctatgtaacgtcgacgctagacgagtcaacacccgggaaatcaaaacgtcacattggcttgtcgctggagccagcccatgccaacaccggaatgtcggagcaggacttggttgagaacagcacgctcatggcctcggttgccagcatcgaggatcacggcttcgtcatgaatataggcatcgccgactccgacgtgaagggattcctgccgcgcaagcagcttgacaagagcatcccccccgagaacctccagccgggatcggttctcctctgcatcgtgacgggcagggccgccagcggaaaggttgtgcagctctccacgctctccgatcgcctcggcaaccccaaacacaaccctgccgaagcgaccacgattggctcctttctgcccggtgccgcagccgatgttctcgtgtccgaggtatcccagcacggtgtcattggcaaggtgatgggccatctggacgtgacagcagatcttgttcactctggtgccgggcccgatggtgtcgacatcgtcaaccagtacaaggtgggctcgcgcctcaaggccaggatcatctgcacgttcccgaatgcgaagttgcccaagctgggcatctccctcctgccacatgtcgtctcgctgaagcccaagatcgcgaacaaagacggtcaggagctcttaccaacagcgatccttgctcactcggccattgtgaacgagtgcacagtacggaaagtggaacctggcattggcctgtacgtcgatgttggcgtcgaaggcgtcccggggttcgtacacatctcgagggtcaaggacggcaaggtcgacaccttgtttgaaaacagcggtccttacaaggtcggctcggtccaccccggccgcgtggtcggctacaacaactttgatggcatgttcctcctctcgttcgagaagaaggtgctagagcaacctttcctgaggatcgaggatatccccataggggcagtggtccccggcttggtggagaagcttgtcatcaaccaagacggcctcggcggtctcattgtcaacatcgcccaaggcatttccggcctggttcccgagatgcaccttgccgacgtccaccttcagcaccccgagaagaaattcggggaaggcatgaaagtcaaggctcgcgtcctgtcgacgaacccggcgatgcatcaacttcgcctgacgctgaagaagacgttggtcaactcggaagcgccggcgatcaagtcctacgatgagctcgcagtcggcctgcaggcaccgggcacgattgtgaacgtgcttcagcacggcgccatcgtccaattctacggccagctccgtggcttcctgcccgtctcggagatgagtgaagcctacatcagcgatcccaaggagcacttccgcgtgggtcagaccgtcagcatctacgtcctcagcttcgatcccgaaactcgcaggctcattgtttcgtgcaaagacccctctgctttcggtctagaaaagcagctcgctctcaagaagctacagattggcgacctcgtatcggccaaggttacgcagaaaaccgaggacgacgtcttcgtcgagctcactgacagctcgctaaaggccatccttcccgtgggacacctaaccgataagtcggtcagcaagacgcaatcggccctcaagaagattcacgtcaaccaaacgctctctgatctggtcgtgctcgagaagaacgaggcccggcggtccatcattctctctcacaagcccagcctcgtccaggcgagcaaagaaggaaaacttcttcggagcgtggacgatgcccggctgggggacacggtcgctggtttcgtccgcaacatcactgccacggccgctttcgtgcagtttgcaggaaacctgaccgctctgctccccaagacgaagctgcccaaagatgcgcaggacaagctcaactttgggttgttcaagtcgcagtcccttgccgtcaagataacctccatcgacagggacctggggcggctgctggttgccatcccgtcggtctcggatgaggaggcgaggaagtcgtccaaacccgccgacagggcggtcaacgcattggacgactcagtctcctcgatggatgacctcaaaattggcaaaatcaccaaggctagagtgaagtcagtcaaagagacgcagctcaacgtgcagattgcggataacgttcaagggcggatcgacgtgtcacagattttcgataagtgggaggacattccggactcgaggaggccactgaagcgattcaagcagaacgacatactggaggctcgcgttctcggcatccatgacgcccgcaatcaccgcttccttccaatcacccaccgatccagccactcggtcctggaattgtcggcgaagcccagcgatttgaaaccagacacgcttcctgagccgttatctctcgacaagatcgagcctggttccagctacatcgccttcgttaacaatgtcgcctccagctatttgtgggtgaatctgtcgccgaacgttcgtgggagaatcagtgccatggaagcgtctgatgacctatccaaattggcaaatctggagaagagcttccccgtgggctcggcgctacaggtgcgggttctttccgtggacaaggagaagcaaagggtcgacctctccgcccgagcgcctggtgaggcggcccagctttcctgggataagatccagcaaggcttggttttgccggcgaaggtcaccaagatcaatgatcgtcaggtcgtcgtcaagctgagcgagttggttgccgggcctgtgcatctggccgacctggccgatgactacgatgaagccaaccccctgtcgcattccaagaacgaaatcgtgcgggtagcggtcgttgaggtggacaagagcaacaagagattgaggctatctatgcggccctcaagagtccttaactcgtccctgcccgtcaaggacaaggagatcacgaagagcaccaagctcgaggttggcgacatcattcgcggcttcgttaagaacgtctcggacaagggtctgttcgtgtcgctcggcggtgatgttgtggctcacgtcaagatcaagaacctctccgatgcgtacctgaaggactggaaggagcacttccaggttgaccagctcgtcaagggccgcatcatctccgtggcggacggccgcatcgagatggacctcaagccgtccgtggtggagcaggactacgtccctccgatcaccattgcggacctgagggagggccagatcgtaactggcaaggtgcgcaaggtcgaggaattcggtgccttcgttgatatcgacggttcgatgaatctttctggtctgtgccaccgcagcgagatggccgaccggaatgtgaaggacgccaggacgctgtacaacgagggcgaccgtgtcaaggcccgcgtcctgaaggtcgacctcgagaagaaacgcgtcaacctcgggctgaagccctcgtacttcaaggacgacgaggtggacgatatggacgttgatagcgaggaagaggatgccggtgcggctctgaatggcgaagaggatagtggagacgaagagatgagcgacgctggtggtgctatcctcgttggcggctccgatgatgacgacgatgaggaagatgaggaagacgatgatgaagggaagagcgatgtcgagatgggcgaagcgccagaggagggactcacgggtctcgaggccggcggcttcgactggacggccgacgccctcgacgccgacgaggatgcaaaggccggcccggccgacgagccgatcaagaagaccaagaaacgccgggagccccagggcatcgtcgataagacggccgagctcgatatcaacgggccgcaaacctcgagcgactacgaacgtctcctgctgggtcagccagattcgtcggagctctggatcgcctacatggcgtcccagatgcagattaacgacctggccagcgcgagacaggtagcggagcgggcgctcaagacgatcaacatcaaggaagagaccgagaagctgaacgtctggatcgcctacctcaacctggaagtcgcctacggcaccgaagagaccgtagaggaagtcttcaagcgcgcatgcacctacaacgacgaccaggaaatccatgagcgccttgccagcatctacatccagtcgggcaagcacaaggcaagttttctttccttttttatttctctccgtccacccactcgccgccttgcaaaacaaagactcttcgaggagaggatcctcaagaaatacggctcgcgctccccacacgtctggatcaactacgcgcacttcctccacaccaaggccaaccagccggagcgcgcgcgggccctgtgcaagcgcgcgacgcagatcctgtgcaacccggccaacgtgcacaccaacccgtcccaggtgtacctcacgctgctgcccaagttcgcggcgctggagttccggtcgcccagcggcgaccgcgagcaggggcgcaccctcttcgagcagctgctcgcgacgtacccgcgcaagttcgacctgtggaaccagctggccgacctcgagacgtcatcgttccgcgacggcgtggacgacgtcggcgtggtgcgggacctgttcgagcgcggcagcaaggtcaaggggctgaagccgcgccaggccaaggcctggttccggcggtgggccaagtgggaggaggagaagggagatgccaagagccgagagagggtgtcggccaaggcgcaggagtgggctcggatggcgggcaagaagttggacgatggcaagaagggggccgatggcgaggcgagcgagggcgaggagcagtga

SEQ ID NO: 3981 - protein, 1835 aa, Myceliophthora thermophilia
MGSLKRKEGPNGASASKSNRAAPESRPSKRAKASESAKAKDDSNKGAKESKPPAKPPATTVISKPKEEEPLFPRGGGSVLTPLEQKQISIQARKDVLFEEQSESKKGDKAAKKKRRKSQVDATVAKATKDEDAVKVESLNFKRLVKGSLVLGTVCAINPLDIAVALPNNLVGHVPITSISESLTQRLQESAEKEEAEEEEEEEEEEEGGGSGERGADDVDLNGLFYIGQYVRAYVTSTLDESTPGKSKRHIGLSLEPAHANTGMSEQDLVENSTLMASVASIEDHGFVMNIGIADSDVKGFLPRKQLDKSIPPENLQPGSVLLCIVTGRAASGKVVQLSTLSDRLGNPKHNPAEATTIGSFLPGAAADVLVSEVSQHGVIGKVMGHLDVTADLVHSGAGPDGVDIVNQYKVGSRLKARIICTFPNAKLPKLGISLLPHVVSLKPKIANKDGQELLPTAILAHSAIVNECTVRKVEPGIGLYVDVGVEGVPGFVHISRVKDGKVDTLFENSGPYKVGSVHPGRVVGYNNFDGMFLLSFEKKVLEQPFLRIEDIPIGAVVPGLVEKLVINQDGLGGLIVNIAQGISGLVPEMHLADVHLQHPEKKFGEGMKVKARVLSTNPAMHQLRLTLKKTLVNSEAPAIKSYDELAVGLQAPGTIVNVLQHGAIVQFYGQLRGFLPVSEMSEAYISDPKEHFRVGQTVSIYVLSFDPETRRLIVSCKDPSAFGLEKQLALKKLQIGDLVSAKVTQKTEDDVFVELTDSSLKAILPVGHLTDKSVSKTQSALKKIHVNQTLSDLVVLEKNEARRSIILSHKPSLVQASKEGKLLRSVDDARLGDTVAGFVRNITATAAFVQFAGNLTALLPKTKLPKDAQDKLNFGLFKSQSLAVKITSIDRDLGRLLVAIPSVSDEEARKSSKPADRAVNALDDSVSSMDDLKIGKITKARVKSVKETQLNVQIADNVQGRIDVSQIFDKWEDIPDSRRPLKRFKQNDILEARVLGIHDARNHRFLPITHRSSHSVLELSAKPSDLKPDTLPEPLSLDKIEPGSSYIAFVNNVASSYLWVNLSPNVRGRISAMEASDDLSKLANLEKSFPVGSALQVRVLSVDKEKQRVDLSARAPGEAAQLSWDKIQQGLVLPAKVTKINDRQVVVKLSELVAGPVHLADLADDYDEANPLSHSKNEIVRVAVVEVDKSNKRLRLSMRPSRVLNSSLPVKDKEITKSTKLEVGDIIRGFVKNVSDKGLFVSLGGDVVAHVKIKNLSDAYLKDWKEHFQVDQLVKGRIISVADGRIEMDLKPSVVEQDYVPPITIADLREGQIVTGKVRKVEEFGAFVDIDGSMNLSGLCHRSEMADRNVKDARTLYNEGDRVKARVLKVDLEKKRVNLGLKPSYFKDDEVDDMDVDSEEEDAGAALNGEEDSGDEEMSDAGGAILVGGSDDDDDEEDEEDDDEGKSDVEMGEAPEEGLTGLEAGGFDWTADALDADEDAKAGPADEPIKKTKKRREPQGIVDKTAELDINGPQTSSDYERLLLGQPDSSELWIAYMASQMQINDLASARQVAERALKTINIKEETEKLNVWIAYLNLEVAYGTEETVEEVFKRACTYNDDQEIHERLASIYIQSGKHKASFLSFFISLRPPTRRLAKQRLFEERILKKYGSRSPHVWINYAHFLHTKANQPERARALCKRATQILCNPANVHTNPSQVYLTLLPKFAALEFRSPSGDREQGRTLFEQLLATYPRKFDLWNQLADLETSSFRDGVDDVGVVRDLFERGSKVKGLKPRQAKAWFRRWAKWEEEKGDAKSRERVSAKAQEWARMAGKKLDDGKKGADGEASEGEEQ

SEQ ID NO: 3982 - DNA, 1623 bp, Myceliophthora thermophilia
atggcccaggaaccgaccgagcgcgacagggtgaccacccttcccaacggcatccgggtggcatccgaagaccttcctgatgctttctcgggcgtgggcgtctacatcgatgccgggtcgcggtacgaaaacgagtcgctgcgcggcgcgagtcacatcatggaccggctagcttttaagtcgaccgggtcgcggtcggccgacgaaatgctcgagacggtcgagaagctgggcgggaacattcagtgcgcgtcctcgagggagtcgatgatgtatcaggcggcgacgttcaactcggccatcccgaccaccgttggcctgctggccgagacgatccgcgacccgaagctcaccgacgaggagattcagcaacaaatcgagacggccgagtacgaagtgagggagatatggtccaaaccggagctgattctgcccgagctggtgcataccgccgccttcaaggacaacacgctcgggaatccgctgctctgcccccaggagaggttaggcgctatcaacagagacgtcatccgggcgtaccgggatgctttctaccggccggatcgcatcgtcgtcgccttcgcgggcgtgccgcacgaagaggccgttcggttggccgagcgacattttggggatatggcaccagcgccttcgccgctgtcgaggacgggctcggaaacatcgctcgactcggcgaggtcggagtccagcggtgcctccgacgcctcgtcttcttcctcctcctcgtctccatcctccgatcccgagccatccgggctgctctccaagattccattcctcaagagcttctccccatccggcagcggctcttcttccccttccgcccccatcaccccgataaccgccgaggacctgtcccgcccggcacactacaccggcggcttcttgtccctcccgccccaaccgctcccgctgaaccccaacctcccgacgttcacgcacatccagctggccttcgagggcctccccatctcatcggacgacatctacgccctcgcgacgctccagagcctcctgggcggcggcggctccttctcggccggcgggcccggcaagggcatgtactcgcgcctgtacaccaacgtgctcaaccagcacggctgggtcgagtcgtgcgtcgccttcaaccactcgtacaccgactcgggcctcttcggcatcgccgcctcgtgctacccgggccgcaccgccgccatgctgcaggtcatgtgccgcgagctgcaggccctgaccgtcgagggcggctactcggccctcaacccggtcgaggtcgcccgcgccaagaaccagctgcgcagcagcctcctgatgaacctcgagagccgcatggtcgagctcgaggacctcggccgccaggtccaggtgcacggccgcaagatcgccgtgcgggagatgacgaggaagatcaacgacctgacggtccaggacctgcgccgcgtcgccaagatggtcgtcggcggcatggtcgagaaccgcggcaaggggagcggcgcccccaccgtcgtgctgcaggaggcgacggcccacggcgtcaagaccgcggagatgtcgtgggatcagatacaagacgtcatttatcagtggggtttggggcggcggtag

SEQ ID NO: 3983 - protein, 540 aa, Myceliophthora thermophilia
MAQEPTERDRVTTLPNGIRVASEDLPDAFSGVGVYIDAGSRYENESLRGASHIMDRLAFKSTGSRSADEMLETVEKLGGNIQCASSRESMMYQAATFNSAIPTTVGLLAETIRDPKLTDEEIQQQIETAEYEVREIWSKPELILPELVHTAAFKDNTLGNPLLCPQERLGAINRDVIRAYRDAFYRPDRIVVAFAGVPHEEAVRLAERHFGDMAPAPSPLSRTGSETSLDSARSESSGASDASSSSSSSSPSSDPEPSGLLSKIPFLKSFSPSGSGSSSPSAPITPITAEDLSRPAHYTGGFLSLPPQPLPLNPNLPTFTHIQLAFEGLPISSDDIYALATLQSLLGGGGSFSAGGPGKGMYSRLYTNVLNQHGWVESCVAFNHSYTDSGLFGIAASCYPGRTAAMLQVMCRELQALTVEGGYSALNPVEVARAKNQLRSSLLMNLESRMVELEDLGRQVQVHGRKIAVREMTRKINDLTVQDLRRVAKMVVGGMVENRGKGSGAPTVVLQEATAHGVKTAEMSWDQIQDVIYQWGLGRR

SEQ ID NO: 3984 - DNA, 1545 bp, Myceliophthora thermophilia
atgagttccgagctcgatgccacctcggccatggcggccgcgagagagagagctcgagcgcttgaccgggatgatccgctcgcgtttacacgcagcgagttcaatattccaaccaagacgcagatcgcgagtacccgcttgcccgacttagctaatgacggccgtctcgtgagcgtagcgactaccgaaactgaccctggtgatggcgccgcggacaagtgtatttacctctgcggtaactccctaggtctccagcccaagcggactcagactcgcctcagccagtaccttgctacctgggctacacagggggttcaggggcacttcaaacccctccaggagtcaccgctgccaacatggctcgatgccgacgagagagccgcccagctgatcgccccgatcgtgggcgcctccgagaccgaggtggccgtcatgcagacgctgaccgccaacctccacctgctcatgtctgccttttacaagccggacgtcaacgggaagcacaaaatcatacttgagagcaaggccttccccagcgaccacgtacggctgctgactcccattgtgtcctccccgaatgtccgacaccgaactaacccccatctctgccagttcgccgtcgagacccaactccgccatcacaatctcgacccggccacctccatgatcaccctcacttcgacatcttcgcccgaggacaacgtcctcaccaccgccgagatcctctccgccatcgacgctcacgccgccaccaccgtcctcctcctcctcccggggatccagtactacaccggccagctcctcgacatacccaccatcaccgcccgcgcccgcgcccgcggcatcttcgtcatctgggacctcgcccatgctgtcggcaacgtgcccctctcgctccacgactggggggtcgacgcggctgcctggtgcagctacaagtacctcaacgccggcccgggctgcatcggcggcctgttcgtgcacgagcgcaacagcgccgtcgcccgggccatcaccgacgagcggcccgaggaagggtacacgaaccggctggccggctggtggggcaacgagaaggccacccgcttcgtcatggccaccaagttccaccccgtccgcggcgccgccggcttccagctgagcaacccgagcatcctggacatcaccagcctgtcggcgtcgctcgagatctttcgcgaggccggcggggtcgccccgctgcgggccaagtcggtgaggctgacggggttcctggagcagctgctgcagacgggcattggggaggaggagagggcgctgttcaggatcatcactccgagcgatccggagcagaggggcgcgcagctgagcctgatgctcaagccgggcctgctggaagcggtcatgagggagctggagaggagggccgtgatcgtggacgagcggaagcccgacgtcatcagggtcgcgcccgcgccgctgtataacacgtttgaggactgcgtagggtttgttgaggcgtttgctgaggcactttcgatagcgaggagagagacggcggcatga

SEQ ID NO: 3985 - protein, 514 aa, Myceliophthora thermophilia
MSSELDATSAMAAARERARALDRDDPLAFTRSEFNIPTKTQIASTRLPDLANDGRLVSVATTETDPGDGAADKCIYLCGNSLGLQPKRTQTRLSQYLATWATQGVQGHFKPLQESPLPTWLDADERAAQLIAPIVGASETEVAVMQTLTANLHLLMSAFYKPDVNGKHKIILESKAFPSDHVRLLTPIVSSPNVRHRTNPHLCQFAVETQLRHHNLDPATSMITLTSTSSPEDNVLTTAEILSAIDAHAATTVLLLLPGIQYYTGQLLDIPTITARARARGIFVIWDLAHAVGNVPLSLHDWGVDAAAWCSYKYLNAGPGCIGGLFVHERNSAVARAITDERPEEGYTNRLAGWWGNEKATRFVMATKFHPVRGAAGFQLSNPSILDITSLSASLEIFREAGGVAPLRAKSVRLTGFLEQLLQTGIGEEERALFRIITPSDPEQRGAQLSLMLKPGLLEAVMRELERRAVIVDERKPDVIRVAPAPLYNTFEDCVGFVEAFAEALSIARRETAA

SEQ ID NO: 3986 - DNA, 357 bp, Myceliophthora thermophilia
atgggtggtacctcctacgtcccttcttccacctcgcaggggtctgggcccgtcagggccgctacacccaccgttgagagggcgccccagtccgctaccaattcgtcatccggggctttcgccggcagtggcgcctactgcgactcgcccacctcgacctcgtcagccgctcctcctttgctctgggagcataaggacgcgaccgagcccgcgccggcttcctcgaccgaggccacgccgaagagggagtccttcgggaaggtcaacgcctacagctactgcggcagacactcaaaggagttcttgtttggcggcaagggctttcacgacctgtggagggctgtcagaaagaagtaa

SEQ ID NO: 3987 - protein, 118 aa, Myceliophthora thermophilia
MGGTSYVPSSTSQGSGPVRAATPTVERAPQSATNSSSGAFAGSGAYCDSPTSTSSAAPPLLWEHKDATEPAPASSTEATPKRESFGKVNAYSYCGRHSKEFLFGGKGFHDLWRAVRKK

SEQ ID NO: 3988 - DNA, 3294 bp, Myceliophthora thermophilia
atgtcaagaccacatcttattcgcgctggtatgcttgagcctccccttcatctcctgcccccggacccctgggggttgcgcgccgccatatcctgtccggtccctcggggctgggtgggccacggcccagtccctctcgcaccccccaacccatgtgtgtgtggcccaatccgtgccgcgccgtgcacacataccattgacctccaagcccacgaggcaccgtccgcgcagagtcaccacaggccgaccgctgacggatccctcgctccacaccaagccgagacccttcgcgaggttgcggccgaggtcgccgaggagaacctccggacgcccggtgtctcgtggaaccccggcccgaacgacattcaagacctcgcctccgctctcgatcgggccaacagtggccagcgaaacggtagcgcggacaccatgcgagctactgcacaccaagatgcactggcgatcgcccagaacggcggcctctccggccaggatgtcgacgacggcgacctaaacggcgacgccgaggtcgacttggacgatgacttgatggacaagatctccagttcgccctcgatcgaagatggtgggtcgaccttcgctctcccgactctgtctccgggcatacacggacccctcccaccaccatcgccaacatggcgtggcccctcgcctctgctgagtgtttgcgacacgaggtcatcttccccatacctcgactgtccagaccatttgccgttgaggagagagggccagggactgcgccagcgcgcggtcgcactgtccccttctgttgctagcacatgtcgccatcatcatcatcatcattgtcattgtcaaggtcatgatcattgtcgtcatcatcaatttccggacggtgagttcgaagtggataccgcggctcaagacggcgcctcaagcgactccctcagtgttccggacgatctccacttcgacgaaagtttgccctgggcagacgaagaggaggacgactatgccgcggcggacgatcgttggaataaggaggaagggacagcaggaggtgaagggtcggtgggtggaaggccggatacggcgaatcgtgagacgcagaacgccaacgcactgcacgacttgattgcgccctacgaaccggatgacaatgacgatgatgatgatcttggcaactctttcgggatccccgagtctagattcattgactctggttggggcggcgaatgcttacaagacacagaggacatcgacttcgacttcgtctatgcccttcacaccttcgttgccaccgtcgagggacaagccaatgcgacaaaaggagacacaatggttcttctcgacgacagcaatagctattggtggttagtgcgcatcgttaaagacagcagcatcggctatcttcccgcggaacacattgaaacgccaaccgagaggttggctcggttgaacaagcaccgaaacatcgatgtaagcccaagggagcgtagcatccgaaaggccgtgtgtattaacctgctgcagctctctgcgtccatgcttggagatcagcctgacaagacccgaaaccccatcaggtccgccatgaagaggaggaagaccaaaaacgtccagttcgcggcccctacttatgtcgactattcagatgtggattactcaagcgaggaagaaggcgccgacccggaggcctctccccagcagcagcagcagaagcagcagtcggagcagtcgcagcaatcgcaacagtcgcaacagtcgcaacaagcttccggcgacggggaaatggaagacgagacggccaaggtggagccattgaagcccaagtcgcagcagaagcaatccaagacggatccgaaacggcaagagtccgggggtgacaccgacacatcctcggctaacaaggcggccgtccgggcggctgaggagacttcggaggccaagacagatgggccaaagaagacgcgcgatggcaccgtacgggattcattctttaaggatgacaccgtcgaaaccaagaagatcacgttgaccccgaacttgctgcgtgatgacaatgagccacgagactcgagcgagttcagggaagtgaggcaacgcccgagcctggacaagctcgagaaagacggtgtttttggcaaagacgacaagaagaagagaaaggagaaggacaaggataaaaaatcaggcggtctacgggggttcttctctcggaaggataagaagacgaagggagacgaagacgacgattcctacggcaagcggtcgctcgacgcagacgcgccggagagagacgtcgaggaagacgagccacaggcatcgtcagagaaatcgggtcctcagagacagcacagcaagttacagaagcagccgaggggcgagccgtctccgaccaggaggtccaacagcgtccgggagcgggagcacggcatggatgtcaagtccttcctgtcggaggggcggatcaacaacgtggcgaatgtccccccggcaacgatgcgcctggttgagtcgagtccgaaggcgtcgccccaagaaaaaccccgagagcagaggtcaggcagggaatcgtcgccagtcaagagcgcctcgtcaaagaccgcgagaccagaagcgcggccggccagaaccactgtcgcgaagcctcatgtggaccttgacgactcggacatggacgacgaggacacggcacccggcccgactcggcaagcaccactggtatccgaggaggcagctcagcaagaaccgcaaccggatgcctcacaagccaacaccgcaccggcttcccaaccgacatcagcaccggcggcggcaccggccgtgagcagcgacccgcggcgaacggccgagcggctgtcggaatcgccggtccaggtgtcgccggtgaccagtggcaacccgccgccgctggtgggcgatagcgccagccaaggagaagaccacgtctcacccgcgtcgtcaccctcgccggaactggtcgaacacgaggaggccgcagagaggtcggcccagaagacctcgacgaccccctcaacgaacaggtcggagtcgtgggacgatgccaggctccgggccttcttcgattcgggcaccgacgtccgggatctgctccttgtggtctacgacaagaacaatgtcgacgatgtgggtttggatcaccccattgccgggtcgctgtttagggaacaaaatgccaaactggccgagattacgacggtgagttggactcccggcagattgtctcgcggtgcattggggagggggaggggatttgctgacgagttttttgttctagcggctcgatga

SEQ ID NO: 3989 - protein, 1097 aa, Myceliophthora thermophilia
MSRPHLIRAGMLEPPLHLLPPDPWGLRAAISCPVPRGWVGHGPVPLAPPNPCVCGPIRAAPCTHTIDLQAHEAPSAQSHHRPTADGSLAPHQAETLREVAAEVAEENLRTPGVSWNPGPNDIQDLASALDRANSGQRNGSADTMRATAHQDALAIAQNGGLSGQDVDDGDLNGDAEVDLDDDLMDKISSSPSIEDGGSTFALPTLSPGIHGPLPPPSPTWRGPSPLLSVCDTRSSSPYLDCPDHLPLRREGQGLRQRAVALSPSVASTCRHHHHHHCHCQGHDHCRHHQFPDGEFEVDTAAQDGASSDSLSVPDDLHFDESLPWADEEEDDYAAADDRWNKEEGTAGGEGSVGGRPDTANRETQNANALHDLIAPYEPDDNDDDDDLGNSFGIPESRFIDSGWGGECLQDTEDIDFDFVYALHTFVATVEGQANATKGDTMVLLDDSNSYWWLVRIVKDSSIGYLPAEHIETPTERLARLNKHRNIDVSPRERSIRKAVCINLLQLSASMLGDQPDKTRNPIRSAMKRRKTKNVQFAAPTYVDYSDVDYSSEEEGADPEASPQQQQQKQQSEQSQQSQQSQQSQQASGDGEMEDETAKVEPLKPKSQQKQSKTDPKRQESGGDTDTSSANKAAVRAAEETSEAKTDGPKKTRDGTVRDSFFKDDTVETKKITLTPNLLRDDNEPRDSSEFREVRQRPSLDKLEKDGVFGKDDKKKRKEKDKDKKSGGLRGFFSRKDKKTKGDEDDDSYGKRSLDADAPERDVEEDEPQASSEKSGPQRQHSKLQKQPRGEPSPTRRSNSVREREHGMDVKSFLSEGRINNVANVPPATMRLVESSPKASPQEKPREQRSGRESSPVKSASSKTARPEARPARTTVAKPHVDLDDSDMDDEDTAPGPTRQAPLVSEEAAQQEPQPDASQANTAPASQPTSAPAAAPAVSSDPRRTAERLSESPVQVSPVTSGNPPPLVGDSASQGEDHVSPASSPSPELVEHEEAAERSAQKTSTTPSTNRSESWDDARLRAFFDSGTDVRDLLLVVYDKNNVDDVGLDHPIAGSLFREQNAKLAEITTVSWTPGRLSRGALGRGRGFADEFFVLAAR

SEQ ID NO: 3990 - DNA, 318 bp, Myceliophthora thermophilia
atgactacttgctccatcctggtgcggggacacgggcagcgaccggtcgaccgaggcaagaggcagcaaaaccacgctgcacctacgataggcctcggcatgtcgagaattctagagctgcagacctcggaatcatctccgttcctcacatgcctgaggcggaggagggttaactcgggcaatgacggcagctacctgaataatgactgtgggaggaccgactctagaacggccagcgacggttttaaaagacaagcatggagcttcaacaaaaccgagaaaagcaaagggaacgaaggaagaagtagcggcgggtag

SEQ ID NO: 3991 - protein, 105 aa, Myceliophthora thermophilia
MTTCSILVRGHGQRPVDRGKRQQNHAAPTIGLGMSRILELQTSESSPFLTCLRRRRVNSGNDGSYLNNDCGRTDSRTASDGFKRQAWSFNKTEKSKGNEGRSSGG

SEQ ID NO: 3992 - DNA, 192 bp, Myceliophthora thermophilia
atggctgttgagcgacctgacctggcctttgcgtctcctggcggacgagcccctgttggcggttcagagcatgtgggagatggggcccggacggtcccaggggcgggcaaacggccccgtgcttcttaccgctcagccacaggagagcgggctctccttggcaatggtggctgggaacaagatggccaatga

SEQ ID NO: 3993 - protein, 63 aa, Myceliophthora thermophilia
MAVERPDLAFASPGGRAPVGGSEHVGDGARTVPGAGKRPRASYRSATGERALLGNGGWEQDGQ

SEQ ID NO: 3994 - DNA, 2547 bp, Myceliophthora thermophilia
atgcctccgaattcagtgtttgaatgggtcgtcggtcaaaatctccccaggaagaagaaggcgaagccttctgggcgagaagttgtcaagatcgaagtgacgaccgacgatgagaccgataccgagtccatcactgtcacctacccacgcaacagcaagtcctcgaggaggcgcaacaagcatagaaagccctcttcggtcccctcgacgtcggaggaaaagaagaaagttacattcgagaaaaagccgctcaaatctgccctgaagaagcgtcaggacgcatcctcctccgaggcgtcctctggcgcttcgtcagaagcttcttcgtcagaggcatcgtcgaatgaatccagcgccgaacagagcagcgaagaaaagctgccgacaagatctaaaaaggcgagggacgcacagaatgcgggaccttcgagccgcgaggcgagaagcggcaatggcagctcccagaaagacaagcacaagcatcagaactgcgtctgctcctgttgcgtgacaggactgctgctgctggccaagatggaggagatcaccaagaacgggaagagcaatgaggtgaccgggaacgttggagacaaggcaggtcagaagaatcatgctacctctgtcgaagacacagccacagcatccgaaccggaaccgccgaagaggaagaagaaaactaaacaacaaacggtcgccgtgtcgtcgaaaacagaggcgaccagtgagacagaatccgagtccgagccgcccaagaagggcaagcagagcggcaaaaagacggagaatgagaaaaaagagaaacaacgcagtgatgaggcagcagggacgaagaatggcaatcaggcaaaggaagggggcaaagccagcggaagcaaagaagcggcggggagaaaaactcgagagggtcccgcagatgagaacatagcgggggacagggacaacgggtccaagaagggcggcaccgtgtacgagaagaaggcggatgcagcccatccgcacctcatcatgccagtccgcgagcgcagcatccagatggaacatgtggttgaagatcccgcccgggatgcgcctcccaacgcctacttcgacaacgacaagaacgtctgtcgtgtctaccacggcccctactggggctacccttacggccagccgtatctccggggtggtctcaacccgcagttcccagccccggcttggcttcctgtgcctgatatacaggcggtgccaggccaccgggacaatggggcgcagatcccctccggctttcctccgcctccccagcagccggcacatacagtgccatacccaacctggggacagccctacggccagttcccgccggcgcctccgtacggcagcacgcagcagcgcccagtcggcgtctcgggcattccgggcagcccgctcaccgccgaggccctgaagcggcatgggttcgacctcaatccgctgtttggcaacctgaagcccggacacggtgagaagcacgagagccgcggttccaagtcgcgcgagcggcacaagacgctgcatgacgagtacaagtcggccaaaggcagcggcgtgcagtggaacacaccgccgactacctgggtcaagctgccgagcaacaagagcaagaacggatcccactccggaagacagaacaacgatggcagtaagaggaaagacgagggccgtatcaacgatggcaacaacaagaacggcaactcgggcgattgggggaacgaaaacaacaacaatccgaccaacgacgaccctaatgactggactaacaacaactccaacaacaacaacaacaacggcaatgactggtgcaataacaacaacaatagctgggggaacaacaataacaacaacggcaacaacggctggggcaataccaacgacgacgacaacaacaacaacaacaacaacaacaacaacaacaacaacaacaacaacaacaacaacaacaacaacaacaacaacaacaacaacaacaacaacaacaacaacaacaacaacaacaacaacaacaacaacaacaacaacaacaacaacaacaacaacaacaacaacaacaacaacaacaacaacaacaacaacaacaacaacaacaacaacaacaacaacaacaacaacaacaacaacaacaacaacaacaacaacaacaacaacaacaacaacaacaacaacaacaacaacaacaacaacaacaacaacaacaacaacaacaacaacaacaacaacaacaacaacaacaacaacaacaacaacaacaacaacaacaacaacaacaacaacaacaacaacaacaacaacaacaacaacaacaacaacaacaacaacaacaacaacaacaacaacaacaacaacaacaacaacaacacccccaagccctcgccggagcccttccgccccgaccccgtctccagcatgccgggcagctggtcgccgcccggcggcaaggccaacatcgagtggaagggcggggacggcggcgataacaacaaggcggcgagctggatggaccggaccgctgcgcaggcggcggatacctggtag

SEQ ID NO: 3995 - protein, 848 aa, Myceliophthora thermophilia
MPPNSVFEWVVGQNLPRKKKAKPSGREVVKIEVTTDDETDTESITVTYPRNSKSSRRRNKHRKPSSVPSTSEEKKKVTFEKKPLKSALKKRQDASSSEASSGASSEASSSEASSNESSAEQSSEEKLPTRSKKARDAQNAGPSSREARSGNGSSQKDKHKHQNCVCSCCVTGLLLLAKMEEITKNGKSNEVTGNVGDKAGQKNHATSVEDTATASEPEPPKRKKKTKQQTVAVSSKTEATSETESESEPPKKGKQSGKKTENEKKEKQRSDEAAGTKNGNQAKEGGKASGSKEAAGRKTREGPADENIAGDRDNGSKKGGTVYEKKADAAHPHLIMPVRERSIQMEHVVEDPARDAPPNAYFDNDKNVCRVYHGPYWGYPYGQPYLRGGLNPQFPAPAWLPVPDIQAVPGHRDNGAQIPSGFPPPPQQPAHTVPYPTWGQPYGQFPPAPPYGSTQQRPVGVSGIPGSPLTAEALKRHGFDLNPLFGNLKPGHGEKHESRGSKSRERHKTLHDEYKSAKGSGVQWNTPPTTWVKLPSNKSKNGSHSGRQNNDGSKRKDEGRINDGNNKNGNSGDWGNENNNNPTNDDPNDWTNNNSNNNNNNGNDWCNNNNNSWGNNNNNNGNNGWGNTNDDDNNNNNNNNNNNNNNNNNNNNNNNNNNNNNNNNNNNNNNNNNNNNNNNNNNNNNNNNNNNNNNNNNNNNNNNNNNNNNNNNNNNNNNNNNNNNNNNNNNNNNNNNNNNNNNNNNNNNNNNNNNNNNNNNNNNNNNNNNNNNNNNNNNNNNNNNNNNNNNTPKPSPEPFRPDPVSSMPGSWSPPGGKANIEWKGGDGGDNNKAASWMDRTAAQAADTW

SEQ ID NO: 3996 - DNA, 762 bp, Myceliophthora thermophilia
atggaaagcctgttcaaggttgacggagaaaacgttcagcttacgctacagcggctcatagaagagtccatttcgcagcgcgttacccggtggaagaccaagcagaaaaagatccccggccgggagctcgcggcacagatcgtcgccatgtgctggggccaggactcccttccctcggcggggcctggatgtcttatgcgggacactaaggggggttacgtttatgttccttacgatgagggtagagatgggcttccccctgctctcgaagaacgcatagacaagctcgagcgctggtttcgaaaccccgccaacggcccgaccgtgcgcgagctggacaaactcctggagaaagaggtcaacgagaaatgtttctgggagttcctggatggcgacaatgcttcgcgaatcgattttcatgggaagatcaagatccttgccaggtaccgtctgatgcaaacaggcgttgacgtttcggccaacgacccccagcaccctcagttcagatttggcgtcgtcaacatcacggaatttggcagcgtcaatatgaagttgtacaacatggactggaattgcactgaaagcgaagttatcgattctttggaggcttattcgaaccctttattcaaccgtgacgccgttcgggacaggctcttgagggaccttgcgacaatctaccatccccgagacgccgtcgaggaggccgaggtcctctatgaagaactcaagtcgcggcaacccaccatgaacgaggccgactag

SEQ ID NO: 3997 - protein, 253 aa, Myceliophthora thermophilia
MESLFKVDGENVQLTLQRLIEESISQRVTRWKTKQKKIPGRELAAQIVAMCWGQDSLPSAGPGCLMRDTKGGYVYVPYDEGRDGLPPALEERIDKLERWFRNPANGPTVRELDKLLEKEVNEKCFWEFLDGDNASRIDFHGKIKILARYRLMQTGVDVSANDPQHPQFRFGVVNITEFGSVNMKLYNMDWNCTESEVIDSLEAYSNPLFNRDAVRDRLLRDLATIYHPRDAVEEAEVLYEELKSRQPTMNEAD

SEQ ID NO: 3998 - DNA, 1101 bp, Myceliophthora thermophilia
atgcagcggtcgtcttcgagacgcaaggccgcccaggcggcaggttcccggccggcctcgcccctggtcgggggggaccagcacatgcggcacatcgacggggcgccgccgggcgatattgtccgcagggccagggaggtacggccgagcgcagacctggccgggcagaagagcaagcgcaacttcttcgaggacgccttctcggtcaacccaaccagcccggccagggagcgagtccgcggcgacgccatcgtcctggccgaggtcaagaccaatgtcatcgtacgcgacgagttcgccttcatcacggaccttgcctgccagctgtcggcgcggtaccagcggcccgtgtcgtcggtggtggtgacgctgcaccacggcgcctgcctcttgttcgggggctccttcgacccggcctacgccatggccgtgcgcgccctgccgtcccagctgcagccgaccaccaacaagcgcaacgccgccctgctccagcgccacatggaggaggccctcggcgtgcccccctcccggggcgtcctgcgcttcgtccccatcccggaggagcacctcgcctgcggcggcaagaccgtggccggggagattgaggagctggagatgggcggtgggtattgccatgttggagttggccagagcggctctcgtggctctggaggctctggaggctctttttttggtgctgctgggtggtcgctgagctcgtcatctccagtggtggtgacggcagcggaggaggatgatgacgaggacagatatcaagggaagagggaagacagagcttcaagagagataaagggaaggaggaggctgagcgtcaagtcccttgccgccttttggaccccttcggccgccagcatggccgcgcacgaattgacaccccctggaagcgccgatggagaacccccgtcgatgcctggatcctattccaggacggcgcccaagattgaacagatcgattcgggaaagaaggcggcgcagaggagaaagagcttcgtagccaccatcttcggccggtccggcagcaagtcctcggaccgctcgtcgctaccggcgattgccgacgacgatgctgctgatgcttag

SEQ ID NO: 3999 - protein, 366 aa, Myceliophthora thermophilia
MQRSSSRRKAAQAAGSRPASPLVGGDQHMRHIDGAPPGDIVRRAREVRPSADLAGQKSKRNFFEDAFSVNPTSPARERVRGDAIVLAEVKTNVIVRDEFAFITDLACQLSARYQRPVSSVVVTLHHGACLLFGGSFDPAYAMAVRALPSQLQPTTNKRNAALLQRHMEEALGVPPSRGVLRFVPIPEEHLACGGKTVAGEIEELEMGGGYCHVGVGQSGSRGSGGSGGSFFGAAGWSLSSSSPVVVTAAEEDDDEDRYQGKREDRASREIKGRRRLSVKSLAAFWTPSAASMAAHELTPPGSADGEPPSMPGSYSRTAPKIEQIDSGKKAAQRRKSFVATIFGRSGSKSSDRSSLPAIADDDAADA

SEQ ID NO: 4000 - DNA, 3204 bp, Myceliophthora thermophilia
atggttctcttcaagcgcaagccggtgcagttcctgcccgtgcccgagatcgaagatgaagaccgagaggtctggcatattccccagaccggcgagatctttctcacatatgaggactacttgcacagaatggatttctacaaacagctcgccggcgctgccgaggtagatcaagcgttccccgaagccctcaaagggcccatccttcggcgcgttcagttccaaaccgtgtcccgcatcgataccctagtcgaccaactctacgatgagttcaagaacgactattaccccggagaggccgtcaccgtgcacattttgggaggcgagaggctccagggcgtcgtgagggacaagactcggttcggcagcaaggtgctccccgatggcaccctcacgccgcccttctcgcgctactttgtcagcctggacgagcgaccggacgaggaggccgtggtggacgactcgcacatcttccgcgaccgcaaggtattcaccaaggccgtcctgcgctccttcatcaagaagacggtaacgagggaagcatggaacggcgccccgtggctggtcaagcatgacgtggccgagaaataccacatcgacacgcgcatcccgccgcatctgcgctacgacaacaaactcctcgagcgcaagcagctgcagctccagaagaaggcatcgcagttcgaccccaccatggtgactcccacgcccgtcagccccaccggcctcaaactccccgagctgaagcccgcgcccaaaagccacaagtccaaggcgcaacaggctctccaagcacaacagcatgcgatcaaggggaaacatagcacgtttggaggccacgagcccggctcgttcgtccacctgccgcttcccggcaaccctttccagttccccatgtccttccgtggccaggtgcctccgcccgtcgtcaggcaacgcgaaccgacgcccccgccgccgcctccgaaatatccgatcgaggacttgcaggtcgagcctcggaagcttgtccggccgcagctgaagtacctgtgcagggatacgccggtcgaagtccagcccgattcaaagtcgccccagagcgacaagattcgcatgaagtcggtgggaccgctgctcgagacgtgggacacgctgaatgtctattgcgagatcttcaagctggactcgttcacctttgacgactttgtggaaaccatgctggtcgcctcggccgagacgccggtccagctcttcgacgagattcattgcgctgtgctcaagatcctggtcgattccgaggccgagggcggcaaagtgcagattcagttgccggagttggaagaggaagaggaggaggaggaggaggagggggaggaggatgaagaggatgagcaagaagagaacgccgcgcctacgcctgaacccgaaccacaaccctcgggccgcgcgactaggagaagcctggccagagcggaggcggagaggctggcggcggaggcggcagcagcggagagggagttgcgagaagccgagaatgcaccgaagcatcgggcggaagagctcctccgggattacgactggattgagcacctgaggaagcgcgatttcaaagacggcggctggcaaatgatcatggtcggtctgttgcaccacctctcgagaaatgagcggctccacgtgagttgcgaggagctactccagcagctggtcccgaccgatatcgagcccagccaggagacggtgcgccaaagatactctgtcctggacgtcaactaccgcgtccaagcactgcagatcatctgcatgctcacgtcggaaaccaaggcagtccgcggttacatggaggattgcagtgagacaatgacggcgtacagaaaggagaagatcgagtggcagaggaagaggaaacaattgatcgaggatctcaaggctctcaacgaccagcggaagattctgttacccgacaacctgcctccgagcccgcctctggagccagtcaagaccaatggggacgtcaagatgtcggatgtcgaggacctccccgccaacacatcggatgaggttccggacacggacgaggacggcccgacgaggaaactacgccgggcaaacgatcgcgccgcagaacgcaaacgcaaggcggagaaggagcaggaacggaaggagaaggccgaggcggctgccaagatgccgaagcagtcgaagcagtttcagcgggtgcttaaggacatccagaagaaggaggacgagattgccgagtgcgagcgcgagattgcagtcatcgacaatgacctgcgcgaggccgactgcccgcgcacgcgcgtgctcggcaaggaccgcttctggaacaggtactactggttcgagcgcaacggcatgccctacggcggcctgcccgatagctcgaccgcctgggccgggtatgccaacgggtgcatctgggtgcaaggcccggacgagctcgagcgcgagggatacatcgacatggcgcccgagtatcaggacgagtacaaggccaagtttggcatgacggttccggagcgcaagaagatggaagagggcaccaccagtgtgttcaacgccttccagtggggctactatgccgatccagaggacgtcgacgccctcctcgcctggctcgacccgcggggtttcaatgagctgaagctgcgcaaggaactggtcaactaccgcgacaagatcgtgaccaacatggagaatcgcaagaaatacctcgccgaatccgagcaacagttgaaggaaaagaacgcccagaatgacgccgagtctgccgcgggcccggcgtcttccgctaacgccaccaccaccaccactaccaccaccaccaagcgaatgagcactcgcgcccgcggtgtgacaaccatttcggcccctcgcctgcaagaccaggccgacgagtcagagcaagcagccgcggcggcggcgtcgtcgtcgtcatcatcatcaccatcagagaagacgacgaagccgaaatattaccgctgcatgaattggcagaacacgatggcactggacgagattggacacctgcacagcgtagaaccgctgccggcgaggccgcggaaggcgacgaagaagaaggaggcggccatggctgcggctgctgccaaggaggctgctgcgaaagaggcagccaatgcggactcgggggagatgatggtgacgcggaagaggggaaagcagagtgcgggaggcaggtga

SEQ ID NO: 4001 - protein, 1067 aa, Myceliophthora thermophilia
MVLFKRKPVQFLPVPEIEDEDREVWHIPQTGEIFLTYEDYLHRMDFYKQLAGAAEVDQAFPEALKGPILRRVQFQTVSRIDTLVDQLYDEFKNDYYPGEAVTVHILGGERLQGVVRDKTRFGSKVLPDGTLTPPFSRYFVSLDERPDEEAVVDDSHIFRDRKVFTKAVLRSFIKKTVTREAWNGAPWLVKHDVAEKYHIDTRIPPHLRYDNKLLERKQLQLQKKASQFDPTMVTPTPVSPTGLKLPELKPAPKSHKSKAQQALQAQQHAIKGKHSTFGGHEPGSFVHLPLPGNPFQFPMSFRGQVPPPVVRQREPTPPPPPPKYPIEDLQVEPRKLVRPQLKYLCRDTPVEVQPDSKSPQSDKIRMKSVGPLLETWDTLNVYCEIFKLDSFTFDDFVETMLVASAETPVQLFDEIHCAVLKILVDSEAEGGKVQIQLPELEEEEEEEEEEGEEDEEDEQEENAAPTPEPEPQPSGRATRRSLARAEAERLAAEAAAAERELREAENAPKHRAEELLRDYDWIEHLRKRDFKDGGWQMIMVGLLHHLSRNERLHVSCEELLQQLVPTDIEPSQETVRQRYSVLDVNYRVQALQIICMLTSETKAVRGYMEDCSETMTAYRKEKIEWQRKRKQLIEDLKALNDQRKILLPDNLPPSPPLEPVKTNGDVKMSDVEDLPANTSDEVPDTDEDGPTRKLRRANDRAAERKRKAEKEQERKEKAEAAAKMPKQSKQFQRVLKDIQKKEDEIAECEREIAVIDNDLREADCPRTRVLGKDRFWNRYYWFERNGMPYGGLPDSSTAWAGYANGCIWVQGPDELEREGYIDMAPEYQDEYKAKFGMTVPERKKMEEGTTSVFNAFQWGYYADPEDVDALLAWLDPRGFNELKLRKELVNYRDKIVTNMENRKKYLAESEQQLKEKNAQNDAESAAGPASSANATTTTTTTTTKRMSTRARGVTTISAPRLQDQADESEQAAAAAASSSSSSSPSEKTTKPKYYRCMNWQNTMALDEIGHLHSVEPLPARPRKATKKKEAAMAAAAAKEAAAKEAANADSGEMMVTRKRGKQSAGGR

SEQ ID NO: 4002 - DNA, 984 bp, Myceliophthora thermophilia
atgcgtcatacgggtgcctggctcccaaagcatgtctcgcccggttcgccgctcccaataaattcctccgcttctgacgcggtgctgccgctccgggccacatacgaatataccggcgccgccagcgaatcaagacggatgccccggagctcaggtaccctatgggcggacaacgtcaacaagaggttctacctctttgccggcgagtactaccaagaaccgccctcgccgcagttcaccctctggtcctacgacaccatctacgacacctggcaatccttcggctcgccgccggaggatgacattgccgccgtgccgtacggtgccggcgtctccatgtccgagacgggcgagggctactactacggcggatggaagtcccacaacaccgtgccgggctggtccggcccaccgagggccgtgtccggtttggtcaagtacgacatggatgccaacacttggtccaccgaaccgggaccggactcgatcggcagagccgagggcgccatgtacgccatcccagaccccatcgtaagcgccatcggcggccccgcgggcggaggcgccaccaataccgcgcccgctgatgggtttagcaacccggacctccgcgtcctcatgacacgcaaggccagcatcgcaacccgaacgcccactcgcgccgtctcctcagcaaccggcgtcccgggggccaacgacgaccctctctcggccggcgccatagccggcatcgccgtagggggcgccgttgccctactggccctcctcgcctccctcttcctcctcatccgtcgctgccgccgtcacaaatacggcaccaccaccaccaccaccaccaccaccctcctccaaccacacttctcccccgccggccggccgagggggggcggcgatgatgggctgcttggggtgggccgggcatcatcatcccgccgggacgcagcagcagcagcacggactggagccgcaacagctgagcgctga

SEQ ID NO: 4003 - protein, 327 aa, Myceliophthora thermophilia
MRHTGAWLPKHVSPGSPLPINSSASDAVLPLRATYEYTGAASESRRMPRSSGTLWADNVNKRFYLFAGEYYQEPPSPQFTLWSYDTIYDTWQSFGSPPEDDIAAVPYGAGVSMSETGEGYYYGGWKSHNTVPGWSGPPRAVSGLVKYDMDANTWSTEPGPDSIGRAEGAMYAIPDPIVSAIGGPAGGGATNTAPADGFSNPDLRVLMTRKASIATRTPTRAVSSATGVPGANDDPLSAGAIAGIAVGGAVALLALLASLFLLIRRCRRHKYGTTTTTTTTTLLQPHFSPAGRPRGGGDDGLLGVGRASSSRRDAAAAARTGAATAER

SEQ ID NO: 4004 - DNA, 4065 bp, Myceliophthora thermophilia
atgcccggccgcccgcctcctggaggctcgtcggcctcgcgaaatgaccttctcctcgacctcgacaatgatcagcccatctacagcacggggcagcgctccgccctgaccgacgacgacctcctccactcgtacgcctacgatcaagacggcgcgccatcacgaccatccgtgtcatacgacgattttgtcggctccggccgctcgggcgcaaccgccggcaggcccccgccggccacgtcctcgagttccgcgccgcgtcccctggggccgtacgggcccgagatccaacgacagtacagccaaacgtcagacttgggcaactaccagagatacgccgatgacttcgacgactacccggacgatggcgggtattatcagcacgggggggctgtggccggcgactcgtcgtcctcggcccgcggaaacgcgaggaaacggaatagcgtcctgagcttgggcggcggctttctcgggagggtcaagaacaggctggggatgggcgagggatactcggagatggacctcccgctcaccgacccacgtgccggagccgggccgggcgggcggacagacaccgccgaggtcgtcccgcccggggagaagaaattcgatatgggcaacttcaggtttggtttcgggaggtcaaaacccgacccgtccaccctcggaccccgcatcatccacctaaacaaccccccggccaacgcggccaacaagtacgtcgacaaccacgtctcgacggccaagtacaacgtcgccaccttcctcttcaagttcctcttcgagcagttctccaagttcgccaacatcttcttcctcttcacggccgcgttgcagcagatcccgggcctctcgccgaccaaccaatacaccaccatcgggcccctcatcgtggtgctcttggtgtcggctggcaaggagctggtggaggactaccgccggaaacaggccgacaagactctcaacaattccaaggctcgcgtcttgcgcggctccagcttcacagagaccaagtgggtcaacgtggccgtcggggatatcgtccgggtcgaatccgaagagccgttcccggccgacctggtgcttctggccagctccgagcccgagggtctctgctacatcgagacggccaacctcgacggggagaccaacctcaagatcaagcaggcgcttcccgagacggcttccatggtgagctcgaccgagctcagccgcctcggcgggagactccgatccgagcagcccaacagcagcctgtacacgtacgaggccaccctgaccatacaggccggcggcggagagaaggagctgcctctgaccccggagcagctgctcctccgcggcgccactctccggaacaccccctggatccacggagtcgtcgtcttcaccggccacgagaccaagctgatgcggaacgcgaccgcggcgcccatcaagcggacaaaggtcgaacgacagctgaacaagctcgtcctggccctcgtgggcatgctactggccctgagcgtcatctcgaccgctggcgatctgatcctgcgccgtgtctccggagactcgttccgctacctcgacctggacggactgggcggcgtcggggacgtcctccgcatcttcatcaaggacatggtcacgtactgggtgctcttttccgcgctggtccccatctcgcttttcgtcactctcgagatgatcaagtactggcacgggatccttatcaatgacgacctggacatctaccacgacgttacggacacgcccgccaactgccgcacttccagcttggtcgaggagctgggcatggtcgagtacgtcttctcggacaagacgggcaccctgacctgcaaccagatggagttcaaggcgtgctcgatcgccggcatcatgtacgccgagaccgtcccggaggaccgcgtcgccaccatcgaggacggcgtcgaggttggcatccacgaattcaagcagctgaagcagaacttacgtgatcatcccaccgcgcaagccattgaccacttcctcaccctgctcgccacctgccacacggtgattcccgagcagaccgattccgggcgcatcaagtaccaggccgcctctcccgacgaaggggctctcgtcgagggcgccgcgaagctggggtacaagttctacgcgcgcaaaccccgcgccgtcgtcatcgaggtcaatggcgagcaggtggagtacgagctcttggccgtatgcgagtttaactcgacccgcaagaggatgtcgaccatctaccgctgtcccgacggcaagatccggtgctacaccaagggcgccgacacggtcatcctggagcgcctcaacgacaacaacccgcatgtcgaggtcaccctccgtcacctcgaagaatacgcctccgaagggctgcggacgctctgcctggccatgcgtgagattccggagcacgagttccaggagtggtaccaggtctacgacaaggcccagacgaccgtgggcggaaaccgcgccgaggagctggacaaggccgccgagcttatcgagaaggactttttccttctcggcgctaccgcgatcgaggatcggctgcaggacggcgttcccgagaccatccacacgctccaggaggccggcatcaaggtgtgggttctgaccggcgaccggcaggagacagccatcaacatcggcatgagttgcaagctcctgagcgaggacatgatgctcctcattgtcaacgaggagaacgccgaggcgacgcgagacaacctgcagaagaagctagacgcgatccatagccagggcgacggcaccattgagatcgggacgctggcgctcatcatcgacggcaaatccctgacgtacgcgctcgagagggatatggagaagctcttcctcgacctcgccgtcaagtgcaaggcggtcatctgctgccgcgtctcgcccctccagaaagccatggtggtgaagctggtcaagaagtatcagaaggagtccatcctcctcgccatcggcgacggagccaacgacgtctcgatgatccaggccgcccacattggcgtcggcatcagcggcatggaaggccttcaggcagcgcgcagcgccgacgtgtcgatcgcccagttccgctttctccgcaagctgctcctcgtgcatggtgcgtggagctaccaccgcgtcgccaaggcaatcctgttttcgttctacaagaacatcaccctctatctcacgcagttttggtacgtcttccaaaacgtcttctccggcgaagtcatctacgagtcctggaccctgtccttctacaacgtcttctataccgttctgcctcctctcgccctgggtatcctggaccagttcgtatctgctcgcctgctcgaccgctatccgcagttatacaacttcggacagcggaaccacttcttcaagggctcggtgtttgcctcgtggatcatcaatgccgtctatcactccatcatcctctatttgggcacctcggccttctacctgaacgacggcgtcgagagcgacggcttccccgcaggcaaatgggtctggggtaccgccatgtacggcgccgtcctcctgaccgtcctgggcaaggcggccctcgtcaccagcaactggaccaagtaccacgtcgttgccatccccggaagcatggccatctggatcgtgttcgtcgccgtctacggcaccgtcgccccgaagctgggcttctccaaggagtactttggcgtcatcccgcgcctgttttccagcccggccttttggctgcagatgcccacgctggcgatcctctgcctcctgagggatttcgcgtggaagttcagcaagcggctgtggcgacctgaggcgtatcatcacgtccaggagatccaaaagtataatattcaggactaccggccgagaatggagcagttccaaaaggccattcgcaaggtccggcaggtgcagcgcatgcgcaaacagcgcggatacgccttctctcaggcggacgagtcgcagaccagggtgctgcaggcgtacgatacgacacagcatcgtgggcggtatggcgagatggcgagctccagactgcaatag

SEQ ID NO: 4005 - protein, 1354 aa, Myceliophthora thermophilia
MPGRPPPGGSSASRNDLLLDLDNDQPIYSTGQRSALTDDDLLHSYAYDQDGAPSRPSVSYDDFVGSGRSGATAGRPPPATSSSSAPRPLGPYGPEIQRQYSQTSDLGNYQRYADDFDDYPDDGGYYQHGGAVAGDSSSSARGNARKRNSVLSLGGGFLGRVKNRLGMGEGYSEMDLPLTDPRAGAGPGGRTDTAEVVPPGEKKFDMGNFRFGFGRSKPDPSTLGPRIIHLNNPPANAANKYVDNHVSTAKYNVATFLFKFLFEQFSKFANIFFLFTAALQQIPGLSPTNQYTTIGPLIVVLLVSAGKELVEDYRRKQADKTLNNSKARVLRGSSFTETKWVNVAVGDIVRVESEEPFPADLVLLASSEPEGLCYIETANLDGETNLKIKQALPETASMVSSTELSRLGGRLRSEQPNSSLYTYEATLTIQAGGGEKELPLTPEQLLLRGATLRNTPWIHGVVVFTGHETKLMRNATAAPIKRTKVERQLNKLVLALVGMLLALSVISTAGDLILRRVSGDSFRYLDLDGLGGVGDVLRIFIKDMVTYWVLFSALVPISLFVTLEMIKYWHGILINDDLDIYHDVTDTPANCRTSSLVEELGMVEYVFSDKTGTLTCNQMEFKACSIAGIMYAETVPEDRVATIEDGVEVGIHEFKQLKQNLRDHPTAQAIDHFLTLLATCHTVIPEQTDSGRIKYQAASPDEGALVEGAAKLGYKFYARKPRAVVIEVNGEQVEYELLAVCEFNSTRKRMSTIYRCPDGKIRCYTKGADTVILERLNDNNPHVEVTLRHLEEYASEGLRTLCLAMREIPEHEFQEWYQVYDKAQTTVGGNRAEELDKAAELIEKDFFLLGATAIEDRLQDGVPETIHTLQEAGIKVWVLTGDRQETAINIGMSCKLLSEDMMLLIVNEENAEATRDNLQKKLDAIHSQGDGTIEIGTLALIIDGKSLTYALERDMEKLFLDLAVKCKAVICCRVSPLQKAMVVKLVKKYQKESILLAIGDGANDVSMIQAAHIGVGISGMEGLQAARSADVSIAQFRFLRKLLLVHGAWSYHRVAKAILFSFYKNITLYLTQFWYVFQNVFSGEVIYESWTLSFYNVFYTVLPPLALGILDQFVSARLLDRYPQLYNFGQRNHFFKGSVFASWIINAVYHSIILYLGTSAFYLNDGVESDGFPAGKWVWGTAMYGAVLLTVLGKAALVTSNWTKYHVVAIPGSMAIWIVFVAVYGTVAPKLGFSKEYFGVIPRLFSSPAFWLQMPTLAILCLLRDFAWKFSKRLWRPEAYHHVQEIQKYNIQDYRPRMEQFQKAIRKVRQVQRMRKQRGYAFSQADESQTRVLQAYDTTQHRGRYGEMASSRLQ

SEQ ID NO: 4006 - DNA, 795 bp, Myceliophthora thermophilia
atgacgcggttccgtccctgcatcgacctccacgcggggcaggtcaagcagattgtcggcggcaccctggacagcaagacgagctcgctccagacaaactttgtctcgccgcacccgcccgcgcactttgccaggctgtaccgcgacaatgccctcaccggcgcccacgtcatcatgctcggcccgggcaaccaggatgccgcgcgggaggcgctcgccgcctggcccggagggttgcaggtcggcggcggcatcaacgactccaatgccaaggaatggattgatgccggtgctgagaaggtcatcataacctccttcctcttccccggcgggaccttctcccagggccgcctggattccgttcttgaagccctcggcggtgacaagaacaagctggtgattgacctcagctgccggcggcacggcggcgaggacaggtggttcgtcgccatggataagtggcagaccatcaccgacgtggaggtcaaccaggattccatcaggcggttagagccgtactgctccgagtttctgatccacgcggccgacaacgaaggtctgcagcggggcatcgacgagaagctggtcgagaagctggcacagtggtgcagcatcccagtgacctacgccggcgggggccggaacctggaggatctggagagagtgaagcagctgagtggcggcaaggtggacctgaccatcgggagcgctctggactgcttcgggggcaaaggcgtgaccctggccgagtgtatagagtggaatcggcagcaggagtcgccagagcgcagttag

SEQ ID NO: 4007 - protein, 264 aa, Myceliophthora thermophilia
MTRFRPCIDLHAGQVKQIVGGTLDSKTSSLQTNFVSPHPPAHFARLYRDNALTGAHVIMLGPGNQDAAREALAAWPGGLQVGGGINDSNAKEWIDAGAEKVIITSFLFPGGTFSQGRLDSVLEALGGDKNKLVIDLSCRRHGGEDRWFVAMDKWQTITDVEVNQDSIRRLEPYCSEFLIHAADNEGLQRGIDEKLVEKLAQWCSIPVTYAGGGRNLEDLERVKQLSGGKVDLTIGSALDCFGGKGVTLAECIEWNRQQESPERS

SEQ ID NO: 4008 - DNA, 7755 bp, Myceliophthora thermophilia
atggctcaagcttcgacagccgattcgtcgcgagaacgtgctgtctcctccgagccttgctcgacccgcccaaatccgttcgacgaagacgacgacaacctgtctgcccggaagcgacgtcgcacgtccttgaccagcgattctcggagccggtcggccgagaccttcgaatcaactccgagctcccccgcagcgggcatgtccgcccccgagcagaggagcgattctgccatgaagattgatccggaccctgccatacccacaaccccagaacggcagcaactcaccgctgagcccggtacggaaccgcggtccagccgcgtcacgatcaatgtgcggacgccatcacaacagcccctcgaggcattacccccatccccgccatcgccctcccatagagctcggagtgtcaccccgccctctgctacatcccgacccgatgccgcgagaaaaagcgtggaggagctcgggaccgacttgccggctaacggtatgctatccgagactcccttgtcgtcaagttcgggcagcggtagccctcccatcgaggtcatctccgtgacgggcgaggatgacgccgatttcgatgacgacgagtccatcactatgctggacgattcgggtcggtcactggaatacgatcctacggccacctttccgttccacgacgccacagaatcatatctggagaccgtgatccggctattgcaatacttgccgacccgtaagcccaaactcatggcccctccttgcgtcgtgggggtgcccagcaagtgcgctgacatgcaacgacccccagacgaacaagtgtcccgcgctttcgtcgaatggattgacaagtatctcagttttgtcaaggccgcttcctccgctgcagttgaggattcgtactttttgtaccgggatatgtggcaagctgtgccccatttggtcctccacatggtcaaccggaagtcgccctatcctcggtccaaggatctgcggcaggagatctttgcgttttacaggtccttttcacaattgacggctttcttcgtcgagctcgacctccgaaccatccggaacccgtccttgtcagaccaggcgcgcattcaggcgctcgcctcaccgccatatcttcacgccctggggtcactgacgcgccgagaagaggtgacaatgcacagctcctcgccgcacctgcgcaatggagaggaggactggagctatctcgccgagatgtctgccgttattgacacatttcagaacttcccggccagtcaaggaggctccctcgcaaacatccgacagctggcctcgtttgaactgcgtcacgtctcccagtttccccgggtggtaactgaccacctcggaaacctatgcctcgtcgcgggaaacatcatgaagtgcgtctaccataggccacaatatcttggtcagcagattagcgagtccgcgaagcgcctcgttagccgcatgtactcggtcttcacggccatggcctctatgctgtcggacatcgtcgagaaaaacttgaatcaactatcgcccgagggcgcaggaaacctcatcgagggagccacagagatatatcaaacctgtctcgctacacctggggtcgtcccgtcggaagtcgtcaataaccacctccaggatcggccgcccgtcgcaccacatctcgcaccagaggcaatggcctaccattggaagttttcgcacttcgtcaagctcatcaaatccagtcagatgcaactgcgcgtcatggccacggcggagccaccaggcgacgaagctcccttcggtctcctgcagtacattgccgacttcctcctcagcaccggcttggtcaactacgtcttgggtccgacctgtcatccggaaattaccctcgaaagcagcaacattatcggctttctcgttgtctcgcacacatattcccgggcccacaccgacaccttctggcagacggtcacgtcgacgcaggatccccgggtatctgacgccctcatacgcatgatcggccgcattgccaacctcttcccactggacgcgttgatgtgttttcttgaaaagcttaacacggtgcccgtggagaactttggatcaaccatgcgggaattctgcgaccaggttctcaagcaaattctcacccgcttcatggacagccttgttaccgagtctataccctttgacctcttcatccgcctcatccgccagtcctccgtgttcgggtcgcagtccccggttgcgtatcccgacatccagcaatttgcgatccaaaaactcgacagtatactgggtcatgggcccggccaagatggacgctggaacatcttccgcgactgcttaagcgacatcgctaatccatccccgtctacgatagggagcctctgggtactcaagatgacgagccgttttcagtatggcagggatctgcacgagctgacgtccgagcatgacctgaccaggctcctaatcgatgagcttgccgcagcggttcccgcaacgaagtctgcaggtttctcgaccactatcagcggacctcagaatgcacctcggaaggagctgctcatgtcaatcatttaccaagagcccgcttctctcacaaaagaccttgggccgaagctctggagtctgcttgtcggcccagaagcggcatgccaggaggatcgagatgccgcgtggcagattctgacgctggccatgaaacggagcgcgggcgagaaccccttcacatcaacttgcttttcagagtacctcccggccctgcaccccaaatatttctgtcatgggactctcgattttgtccgcgagggcgtgatgccactggtgaacgaccctaccagtatcgtcctggacgacgatgagaatcccaaccactctgggattgagatgctgtggcggcttgctcttactgcaccgacaggaactgttgagcaaagggccattcacacgttagtcaacgacgtgtacattgagagccgttccatccagtcattctcgcactaccgggctcggaaagtccatctcgccctcgttgaccgttgccttcgccagctgtcttcggcagccgcaaagttgagagcctttgctaatggcgttgctggcggaggggatgactccatggaaatagttgccacggatgagcaagttcaagagcaggagctattgttcgtccgctcgctggcggtcctgagagagttccaccaactccatcagtccaggccggagttctccgcaccggacatgagatcgctccttctcgagtccccgaaggatattgaaggggaaccagcagaactgaagtaccagtcatttgatggggacaagcaaaccaccgtcatgcccctgaagatcggcaagcggaacacggctgcgtcgctgcttgcgagtctgcgggaagcgacgggtttcaacagctaccgtatttactaccgtgggaggccatttgttccccaagagagcgacatctgcaaatcccttgaggaccttcagattcacaacggcatcatcctcgtcaagaaggagcctgaggctcccgcctccccaagagttccccagggcgcatctcccgtggagattgagatcctgagccattttgacgaactctgggagtatctttcaatggaggaaaagcttgctcgcgagatatacggttttctggtcaagctcccggctgatgacaaacttctggaaaccatcggcgacccttctgtctcctacaaggacacattttccctgggacaaccattcaaatcactctacgccgttaatgctctccaggaatatctcgacagttgtcgaccgggctctcctgcttcagatgaaaggaggagtcacgaacgagacgaggcttccggtttacgttcagctcccttgcttcggtccctttcccttgttgtccgagcaatctcagatcccgagatcgtctctcattgttcgaatcgggagctccagattgagctgagctctgctcttgtctcgttgctggcttctcttctcagagatccggagcttccggcttccgccgctcaatttctcgacgcgccgcttttggatcgcctcctagccatcctatcgatggctaccccggcggactccccgaagagtgccaccaaacatattgccctctgtctgcagagcatcttggagtcttgctgcacaagcagcgacttcatgacggcgttctccacccattcagatgttccacggatcatcggcgatcttcttctcaacgacccacgggagacggtcaggcaaacgactgcaatgctcctccgggaaaagtcaggcacagctgcagagggtgaaagatattccaacaaggaatccgcaacgattgcgaaatttcgagacttcttttggcccttagtctcccagcttgtcgggccagcgatttccaagacggataactcgacggagatccttgaactatgttttgacatgctccagaccctggaagagacgcatccagggtcccccaacctcgagcagctctcccatcactggttaaacctgcttctcaactacaccacatccgaggatctcaccaggcccgccgagcctgatgtggttgcggccggccttgttcggctcctgcacaccatcatatgtaggagaggcgagcaagtcggccggggtgtgctttcaagacgggggcttgcgcgaaggatcttttggaaacacctcttcccgcctcgtgaggagtacgagaaggaattcgggccgggtcggccaattgcttgtccccagactcgcggttggcttatggaaatcatcttcacaatggtcaaagacgaccccaccgaattcatgtggcttctcgaggacatggatgacttggtcccggtctttcccaaccaagaaggggatgtctatgcatacgagttgcctcaacaattcgagaggtcaaaagccattagagcgccgtgcggctaccctggcgttcgaaacttgtccaacacctgctacttcaactcgctgttgacgcagctattcatgaacgtcgactttcgcgagttcatgcttggggcgaccgtccaagaccgggaatacagccaaaatctgcttttccagactcagaagttattcgcctttttgcaagacagcgtccggcccttcattaaccctgaggagtgcgttgggagcatcaagacatacgaggacacacaaatcgacgtcgtcattcaaatggacgttgacgagttctacaatctgctgtttgaccgctgggagggacagttcctcaccagtgacgagaaaaaccggttccgttccttttacggtggccaactggttcagcaagttcgctctcaagagtgcgagcatgtttctgagaggctcgagcccttctcggctattcagtgcgatatcaaggggaagagctcgttgcaagagagcctgcaggcttatgtcgatggtgaaatcatggaaggcgataacaagtacaaatgttctacctgcgatcgtcacgtcgacgccgtcaagagggcgtgtctcaaggatgtcccagacaaccttatctttcacctgaagcgctttgacttcaacctcagaacaatgcagcggagcaagatcaacgactacttctccttcccagacaagatcgacatgcggccgtacactatcgaacatctgagcaaccctaaccaagaacagctggaggacatttttgaacttgtaggcgtcctcgtccataccggaactgccgaatcgggccactattattcctacatccgggagcgcccaaccctcggcgacacgcagacgtgggtcgaattcaacgacgagacggtcaccccatgggacccggcctcaatggcgaactcttgcttcgggggcccggattaccaatctcagttccagtcaggcaacacagtctttgagaagcagtacagtgcctacatgctgttttaccagaggtcgtcgtctctcgccaagaggcaggagagcctgccgcgtctggggcgcccggcccctttccgcgtgaagatgcccgaggacatagaggaattcatccacgatgagaatgcctggctgctcaggagacattgtctgttcgatccttcccagatccagtttgtgtgcttggctctcttccagctgaagagcctatatccaaatggatgctcaccggaccatgctctggaaacacaagcgatcgcgatggctctgagtcacctggatcaagtggcgtcacgaacaaaggatgttccggacttctacaaccttctcacccgcatccaggtcatgtgtgacagttgcgctcactgcagcgtcgccgtccacgactatttcagcagatacaccttcgcttttcgcatgctggtgcagagaaacgtcgacgaggaggtgcgacaggccacagccaactttatgattcaggtgcttcagttgatcaaggaacgagtcccggcgcaatatggtattccgtctccggaagaagatggcgaatcggatgcagaagaagtggacgggaggcaatccgtcatcgcgggggtgttgcgcatcatcgagcacctgtggcagggtttccacatgaacttgcgttcatggcacgaagtattcgactttatgctgtccttcgtcaagctgggtcgccacgagctggcggctttcttagagcacccacatttcctcaagtggctgatatggattgtgtgggcagatacccaggcagagccgttcctctctccgcagtttgtcaagatggttgccgtggtctctaggcgaatgccgaaccggcctccatcgtacgaaactatcatcgcgctgctggattacatacttgcaaacacgcggctgccgaccaacatcgaagggaatctcccgaccgcgggtgccgtggagcctggcgaggccagcactgattcagaccagctgtttgagattgggctcgacgaggccagcatcatctatcgaatggggccccgtacagtcccggtcaacgtatttgtggacaggctgattacgattgcgcagaaccctgcgtcgaccaattcgatcgtcgcaaacctgatgaagcagaatcgccagatggagaatgcaatctatcgcaccctactcttccggatttcgggacagctaggccacccggtctcgccatacttgcgtgtggccgggatggtgttttgtcgcaacgcgagcgacgcagccatgatcaacaacctgatcaagcacgtctcacaacagtgcatgtcgctgcaaaatgctgagggcagagctttcttggattttatgagagagacttttgacggcccgcggccgagatccggggaaacgcgacatcaaatcatcatgacgagcctcgataggcttccagactgggcgcccggcctgctgggctactttgacacttcggtcattgacgggacggagatcttcttgcaggacaagctattccaataccgcaccttccgccctcctaccggagaagagacgggccaggcaggggaactggccgagaggatgagggtgacagcaagggcactggggtttaggtgcctgcactatctgcacgagaactacgtcctccgcaacgccgaggtgacggagcgcgccgtcgctggcctgcagagggttatcaagaactgcagcaggtacttcaacctgaaggagccagcggaggatgacgaggcagcagagtttgtgcagctcaaccagagtatcttcgattcgctagccgggcttttggtcgtcgacgagctagaggaagacggttcaggaatgtattatagcgacgactcgagcgtcgcgtcgagcaacacggctggctga

SEQ ID NO: 4009 - protein, 2584 aa, Myceliophthora thermophilia
MAQASTADSSRERAVSSEPCSTRPNPFDEDDDNLSARKRRRTSLTSDSRSRSAETFESTPSSPAAGMSAPEQRSDSAMKIDPDPAIPTTPERQQLTAEPGTEPRSSRVTINVRTPSQQPLEALPPSPPSPSHRARSVTPPSATSRPDAARKSVEELGTDLPANGMLSETPLSSSSGSGSPPIEVISVTGEDDADFDDDESITMLDDSGRSLEYDPTATFPFHDATESYLETVIRLLQYLPTRKPKLMAPPCVVGVPSKCADMQRPPDEQVSRAFVEWIDKYLSFVKAASSAAVEDSYFLYRDMWQAVPHLVLHMVNRKSPYPRSKDLRQEIFAFYRSFSQLTAFFVELDLRTIRNPSLSDQARIQALASPPYLHALGSLTRREEVTMHSSSPHLRNGEEDWSYLAEMSAVIDTFQNFPASQGGSLANIRQLASFELRHVSQFPRVVTDHLGNLCLVAGNIMKCVYHRPQYLGQQISESAKRLVSRMYSVFTAMASMLSDIVEKNLNQLSPEGAGNLIEGATEIYQTCLATPGVVPSEVVNNHLQDRPPVAPHLAPEAMAYHWKFSHFVKLIKSSQMQLRVMATAEPPGDEAPFGLLQYIADFLLSTGLVNYVLGPTCHPEITLESSNIIGFLVVSHTYSRAHTDTFWQTVTSTQDPRVSDALIRMIGRIANLFPLDALMCFLEKLNTVPVENFGSTMREFCDQVLKQILTRFMDSLVTESIPFDLFIRLIRQSSVFGSQSPVAYPDIQQFAIQKLDSILGHGPGQDGRWNIFRDCLSDIANPSPSTIGSLWVLKMTSRFQYGRDLHELTSEHDLTRLLIDELAAAVPATKSAGFSTTISGPQNAPRKELLMSIIYQEPASLTKDLGPKLWSLLVGPEAACQEDRDAAWQILTLAMKRSAGENPFTSTCFSEYLPALHPKYFCHGTLDFVREGVMPLVNDPTSIVLDDDENPNHSGIEMLWRLALTAPTGTVEQRAIHTLVNDVYIESRSIQSFSHYRARKVHLALVDRCLRQLSSAAAKLRAFANGVAGGGDDSMEIVATDEQVQEQELLFVRSLAVLREFHQLHQSRPEFSAPDMRSLLLESPKDIEGEPAELKYQSFDGDKQTTVMPLKIGKRNTAASLLASLREATGFNSYRIYYRGRPFVPQESDICKSLEDLQIHNGIILVKKEPEAPASPRVPQGASPVEIEILSHFDELWEYLSMEEKLAREIYGFLVKLPADDKLLETIGDPSVSYKDTFSLGQPFKSLYAVNALQEYLDSCRPGSPASDERRSHERDEASGLRSAPLLRSLSLVVRAISDPEIVSHCSNRELQIELSSALVSLLASLLRDPELPASAAQFLDAPLLDRLLAILSMATPADSPKSATKHIALCLQSILESCCTSSDFMTAFSTHSDVPRIIGDLLLNDPRETVRQTTAMLLREKSGTAAEGERYSNKESATIAKFRDFFWPLVSQLVGPAISKTDNSTEILELCFDMLQTLEETHPGSPNLEQLSHHWLNLLLNYTTSEDLTRPAEPDVVAAGLVRLLHTIICRRGEQVGRGVLSRRGLARRIFWKHLFPPREEYEKEFGPGRPIACPQTRGWLMEIIFTMVKDDPTEFMWLLEDMDDLVPVFPNQEGDVYAYELPQQFERSKAIRAPCGYPGVRNLSNTCYFNSLLTQLFMNVDFREFMLGATVQDREYSQNLLFQTQKLFAFLQDSVRPFINPEECVGSIKTYEDTQIDVVIQMDVDEFYNLLFDRWEGQFLTSDEKNRFRSFYGGQLVQQVRSQECEHVSERLEPFSAIQCDIKGKSSLQESLQAYVDGEIMEGDNKYKCSTCDRHVDAVKRACLKDVPDNLIFHLKRFDFNLRTMQRSKINDYFSFPDKIDMRPYTIEHLSNPNQEQLEDIFELVGVLVHTGTAESGHYYSYIRERPTLGDTQTWVEFNDETVTPWDPASMANSCFGGPDYQSQFQSGNTVFEKQYSAYMLFYQRSSSLAKRQESLPRLGRPAPFRVKMPEDIEEFIHDENAWLLRRHCLFDPSQIQFVCLALFQLKSLYPNGCSPDHALETQAIAMALSHLDQVASRTKDVPDFYNLLTRIQVMCDSCAHCSVAVHDYFSRYTFAFRMLVQRNVDEEVRQATANFMIQVLQLIKERVPAQYGIPSPEEDGESDAEEVDGRQSVIAGVLRIIEHLWQGFHMNLRSWHEVFDFMLSFVKLGRHELAAFLEHPHFLKWLIWIVWADTQAEPFLSPQFVKMVAVVSRRMPNRPPSYETIIALLDYILANTRLPTNIEGNLPTAGAVEPGEASTDSDQLFEIGLDEASIIYRMGPRTVPVNVFVDRLITIAQNPASTNSIVANLMKQNRQMENAIYRTLLFRISGQLGHPVSPYLRVAGMVFCRNASDAAMINNLIKHVSQQCMSLQNAEGRAFLDFMRETFDGPRPRSGETRHQIIMTSLDRLPDWAPGLLGYFDTSVIDGTEIFLQDKLFQYRTFRPPTGEETGQAGELAERMRVTARALGFRCLHYLHENYVLRNAEVTERAVAGLQRVIKNCSRYFNLKEPAEDDEAAEFVQLNQSIFDSLAGLLVVDELEEDGSGMYYSDDSSVASSNTAG

SEQ ID NO: 4010 - DNA, 924 bp, Myceliophthora thermophilia
atggcggcgggacaggaattccagcaatggcaggtcagcgagccctaccttgagacgcactgctcgctcggcgaggggccatactatgagccggccaccaacacgctgcgcttcgtcgacatcatcaagaagcagctccacaccgtttcgctcgccgagggaccttcgtcgctccagacgcttcagttcgatgagcccgtcaccgtcacggccgacatcgaaggccgggatccgcaggaggctctcctggttggggccaagcagggcctggccgttctggataggaagacgggcaagtatgaatacgtcaccaggtttggcgacgagaaggccgaacggatccggagcaacgatggcgtggtcgacccgaacggccgcttctggcttgggaccatgacagacttcggccaggggccttttcagccagagggctctctctaccgcttcaccgccggcgccccggccgcccgcaccctctcagacctcaccatccccaactcggtcggcttctccccctcgggccgcaccatgtacttcacgcactcgacggcgcgggaggtgctggcgtgggactacgacccgtcgacgggggcgcactcgaaccagcgcgtcttctaccgccacgacgggccgggcgagcccgacggcttccgcgtcgacacggacggcaacctgtggcacgccgtgtacggcgaggcgagggtgctcaagatctcgcccgacggccggctggtcggcgaggtgcgcatcccgacgaggaacgcgacctgctgcgagctcgtcggcgccggcgagctcgtcatcaccaccgccgccgacgacgacggcgaggccgacggcgagagcaggcgcctcggcggcgccgtcttcaaggtgcacgtcggtgccgaggggaccccgaggttcgcatataagttgtattaa

SEQ ID NO: 4011 - protein, 307 aa, Myceliophthora thermophilia
MAAGQEFQQWQVSEPYLETHCSLGEGPYYEPATNTLRFVDIIKKQLHTVSLAEGPSSLQTLQFDEPVTVTADIEGRDPQEALLVGAKQGLAVLDRKTGKYEYVTRFGDEKAERIRSNDGVVDPNGRFWLGTMTDFGQGPFQPEGSLYRFTAGAPAARTLSDLTIPNSVGFSPSGRTMYFTHSTAREVLAWDYDPSTGAHSNQRVFYRHDGPGEPDGFRVDTDGNLWHAVYGEARVLKISPDGRLVGEVRIPTRNATCCELVGAGELVITTAADDDGEADGESRRLGGAVFKVHVGAEGTPRFAYKLY

SEQ ID NO: 4012 - DNA, 1545 bp, Myceliophthora thermophilia
atggccgagaatttcaatcttgacttagtctaccgctatggagtagcagatgatgacgtggactcgctcttcggcggcggcgatgagatcgatccggcttctctctttactgaagccggcgccatcgagccgccgccgaggtcgtgcgggcccgattgtgagccggcgtcaccttcgtcgcatggaaaccttcatgatgcgactaactcagccgctcagctccgctttcccaacgtctcggcgcctgctcctgctcagtcgacccagaatgacgcgccggcggtgcaacagtcggcgttcccgggctcacctcgggagcctcaactgtcactgccccagctctccctgcccgcggtccctgatcctctagatgcctttttatcgctcctagatggacacacttcagcgagatcgcctgaggaggaccccgatgatgcggctctggaagccgagctcacagacctctgggaggccgccacaagcagcgaaccgcctgttaatgctcaagcagaagaccgagacggcgacacgatccggaatgagatggaaatctccccggctgacatgcccggctttcgctacgcaaagagccagaccaactcgttcattcgcttgcctcggcgaatcgaccacgacttgaagttggcacatgaacttggctactatatcacgctcaatcgcaaaaccaaggttgaggttctctacggccaccttgagctgactctggacgagggcaagcgcctcggccaggacatcaaaaaaattttgcaggattccaagctctttccgctcgtctcggaacccacaggtaccgcaaccgcaaccaaaaaggtgctcatcaagatcgccttgtacctcctcatcttcaaagattggggccgcatctggttcggcgacaagcggaataacgcagccactcgcaaatatctctggcccagagattcgtcaatcctcctcgccggctttgtcatggttctttaccggatgtacaccaatacaaagcagaagtacctcgccatgaaacgcatccaggctgcgatgaagaacgccgactccggcgaccagactccgctgtcgccgtcctcgccggctccctccgcagagtctcccaaatccgccccgggcggggccgagcctaccgctcaaggccagtcattcttcgcggcgctcgtctctggcgccgtcgccggcaagaagcgcaagctcagcgaagccattctcggtctcgacgatcaccacgccgacgcggcggaggtgcccgccaatgcccggctcaagtaccacgtctacgtcaaggacaaggccgacggcgtcgacatcgcgccgcccaccacctaccgccacaccgactacatgatcgcgcacggcgccttttccagcatcaaggccgccttcgaggccgccggccaggatcccgtctatgagatcatgaccccgtccggcaagagaaagatccacagcgaggccgactgggatgccgcagtcctggccatctacaacgccaggcgcgccggcggcgtcgtggaagtggaaatctttgtctga

SEQ ID NO: 4013 - protein, 514 aa, Myceliophthora thermophilia
MAENFNLDLVYRYGVADDDVDSLFGGGDEIDPASLFTEAGAIEPPPRSCGPDCEPASPSSHGNLHDATNSAAQLRFPNVSAPAPAQSTQNDAPAVQQSAFPGSPREPQLSLPQLSLPAVPDPLDAFLSLLDGHTSARSPEEDPDDAALEAELTDLWEAATSSEPPVNAQAEDRDGDTIRNEMEISPADMPGFRYAKSQTNSFIRLPRRIDHDLKLAHELGYYITLNRKTKVEVLYGHLELTLDEGKRLGQDIKKILQDSKLFPLVSEPTGTATATKKVLIKIALYLLIFKDWGRIWFGDKRNNAATRKYLWPRDSSILLAGFVMVLYRMYTNTKQKYLAMKRIQAAMKNADSGDQTPLSPSSPAPSAESPKSAPGGAEPTAQGQSFFAALVSGAVAGKKRKLSEAILGLDDHHADAAEVPANARLKYHVYVKDKADGVDIAPPTTYRHTDYMIAHGAFSSIKAAFEAAGQDPVYEIMTPSGKRKIHSEADWDAAVLAIYNARRAGGVVEVEIFV

SEQ ID NO: 4014 - DNA, 2556 bp, Myceliophthora thermophilia
atgatggccggcccaaaccgtgactcggttaatggcggatccagggattcgcccgggatttccgtgccctcagaaacctacagcttcccgccagaagccttcgattggagccgccttccagacgtcgacaccgatttcctccccccagaacacctcgaggccttcattcaggctctctctgcaccggacccgataccccagaccccggacgactttgccgctacctcgacctaccccctcaacagccctgggccgcaccgcgattccacagccagttttgacattgacgccaccaggcgcgccacacgctcaagcttgagcttccacgatgaggatcgcgggtcgcgggatgccgccagagctgccgccgccgccgctgccgccgtcgccgatgtggctgctccaggcccggcatcatcacggcagccgaccgttggaaaccgccggccgagcagtagcagcctgttcatctcagcacggaatgactgggcaccggtgcacgagagggtccgccgggacaggaaagacgcgccgccctcgacaaggaagaagaagaagaagacgaggaggaaggcccgcaccaaggacgagacccgcgagggctacttctacaaccttctcaaatggcccctgctgttcatcgtcggcgcctggctcctcggcctatcggtcatgtacctcgccacgcgcatgtacatctcgctctacgagcagctgatttcctggcgtgggcagagggaacgtctgcggcgggcgatgcgctccacgacccgataccaggactgggcggcggcggcgcagcgaatggacgacttctttgggaacgggaggtggaaggagcaagacgagtttgcgtactacgacagcaagacggtgaagagggtgttggaggagatgaagcggtgcaggcggcgggccgagagggcgcgtgacgggggggagccagacgagtgcagacagacgacggaggacctgaaggtgctgatcgaggcgtgcgtcaagaataactttgtcggcatcgagaatccaaggctgtatagccagacgtactacgggaccaagaacttggtgcagaactacattgacgaggtggaacgcagcatcaagtttctgatcgatacggatcagctctccaaggaagagaagcgtgtcatgttcaagagaatctgcgcaaactatggccggacggcactctgtctgtccggcggggccacgttcgcctactatcacttcggcgtcgtcaaggctctgctggaggaggactacctccccgacatcatcaccggtaccagcggcggcgccctggtggccgccctcgtagccacccgcactaacgaggagctcaaggagctgctggtgccagcgctggcgcatcgcatcacagcctgccgcgagcccatcgccgtctggttccgccgctggtggaagaccggcgcgcgcttcgactcggtcgactgggcacgccagtgcgcctggtggacgcgcggctccatgaccttccgcgaggcctacgagcgcaccgggcggatcctcaacgtctcgtgcgtgccctccgacccgtactcgcccaccatcctctgcaactacctcaccagcccggactgcgtcatctggtcagccgtgctcgcctcggccgccgtgccggggatcctcaacccggtcgtgctcatgatgaagacgcgctccggccagctcgtgccctactcgtttgggcacaagtggaaggacggctcgctgcggaccgacattcccgtccaggcgctgaacctccacttcaacgtcaacttcaccatcgtcagccaggtcaacccgcacatcaacctcttcttcttctcgtcgcggggctccgtcggccagcccgtcatccaccgccggggccgcggctggcgcgggggctacgtcggctccgccctggagcagtacctcaagctggacctgaccaagtggctgcgcgtgctgcggcagctcgagctgctcccgcgcccgctcggccaggactggagcatgctgtggctgcagacgttcggcggcaccgtcaccatctggccgaaggtcgtcatgtcggatttccccaggatccttaccgacccggacccggcccggctggcacgcatgatctacgaggggcagcagagcgcgtttcccaagatgaagtttgtcgcgaaccggctgcggatcgagaggctggtggagaagggacggagggagagcaggctcgggagcgcgggcgcgcgccccgtcgttgctaccgctgctgctgccggcgagcctggggccgaggccggggccggcagggaggtgaggaggctgagcatggagagcatcctgagcgaggacgacctgaggagcctgctgagggtgcgggaaaggaagagggatggcggggtcggcgcggcgacggagacggaggaggacgagacgacggactacgaggaggaggggggcatggtgtttgacggggacgatgcagaacggcagctcagggcggccgcgaggatgagggaggagcccaagatcgcgacgccgatggggctggcgggcgccgaggtgcactaa

SEQ ID NO: 4015 - protein, 851 aa, Myceliophthora thermophilia
MMAGPNRDSVNGGSRDSPGISVPSETYSFPPEAFDWSRLPDVDTDFLPPEHLEAFIQALSAPDPIPQTPDDFAATSTYPLNSPGPHRDSTASFDIDATRRATRSSLSFHDEDRGSRDAARAAAAAAAAVADVAAPGPASSRQPTVGNRRPSSSSLFISARNDWAPVHERVRRDRKDAPPSTRKKKKKTRRKARTKDETREGYFYNLLKWPLLFIVGAWLLGLSVMYLATRMYISLYEQLISWRGQRERLRRAMRSTTRYQDWAAAAQRMDDFFGNGRWKEQDEFAYYDSKTVKRVLEEMKRCRRRAERARDGGEPDECRQTTEDLKVLIEACVKNNFVGIENPRLYSQTYYGTKNLVQNYIDEVERSIKFLIDTDQLSKEEKRVMFKRICANYGRTALCLSGGATFAYYHFGVVKALLEEDYLPDIITGTSGGALVAALVATRTNEELKELLVPALAHRITACREPIAVWFRRWWKTGARFDSVDWARQCAWWTRGSMTFREAYERTGRILNVSCVPSDPYSPTILCNYLTSPDCVIWSAVLASAAVPGILNPVVLMMKTRSGQLVPYSFGHKWKDGSLRTDIPVQALNLHFNVNFTIVSQVNPHINLFFFSSRGSVGQPVIHRRGRGWRGGYVGSALEQYLKLDLTKWLRVLRQLELLPRPLGQDWSMLWLQTFGGTVTIWPKVVMSDFPRILTDPDPARLARMIYEGQQSAFPKMKFVANRLRIERLVEKGRRESRLGSAGARPVVATAAAAGEPGAEAGAGREVRRLSMESILSEDDLRSLLRVRERKRDGGVGAATETEEDETTDYEEEGGMVFDGDDAERQLRAAARMREEPKIATPMGLAGAEVH

SEQ ID NO: 4016 - DNA, 1137 bp, Myceliophthora thermophilia
atggcgaccacaatagacaagatcaaagagatcgaggccgaaatggcccggactcaaaagaacaaagccacatcataccatctcggccagctcaaagcaaaactcgccaagctcaaacgtgaactcctcaccccgtcgggcggcggcggcggcggcggcggcgtgggcttcgacgttgcacgcaccggcgtcgccagtatcggcttcattggcttcccctccgtgggcaagagcaccttgatgagcctgctgacgggacagcactccgaggctgccgcatacgagttcacgacgctcaccagcgtgcccggccaggtagtctacaacggcgcgccgctacaaatcatcgacctgcccggtatcatcgagggtgccaaggacggccgcggtcgcggccggcaggtgattgcggtcgccaagacctgtcacttgatcttcatcgtgctcgacgtgaataagccgctccacgacaagaggatcatcgagaacgaactggaggggtttgggatccggctcaacaagcagccgcccaacatcacgttcaggaagaaggacaagggcgggctcaacatcagcagcacggtgcccctgacgcatattgatcatgacgagatcagggcggtgatgagcgagtacaagatcagctccgcggatatctccatccgttgcgatgccaccatcgacgatttgatcgacgtgctcgaggcaaagagtcgaagttacatcccggccatctacgtgctcaacaagattgacagcatcagcatcgaggagctcgacctgctctaccgcattccaaattcggtacccatcagctcggagcacgggtggaacattgacgagctgctggaggtcatgtgggaaaaactcaatctcgtccgggtatataccaagcccaaaggcaaaatgccagactactcggcgcccgtcgtgctgcgcgcgaacaagtgcacggtagaagacttttgtaaccaaatccacaagagcatcgttgagcagttcaaggtagccattgtctatggcaagtcggtcaagcaccagccgcagcgagtcggcctcgctcatgagctggcggacgaggacgtcggtatgtattttcccgtcgcggaccaagcgtctcaacatccacccggctga

SEQ ID NO: 4017 - protein, 378 aa, Myceliophthora thermophilia
MATTIDKIKEIEAEMARTQKNKATSYHLGQLKAKLAKLKRELLTPSGGGGGGGGVGFDVARTGVASIGFIGFPSVGKSTLMSLLTGQHSEAAAYEFTTLTSVPGQVVYNGAPLQIIDLPGIIEGAKDGRGRGRQVIAVAKTCHLIFIVLDVNKPLHDKRIIENELEGFGIRLNKQPPNITFRKKDKGGLNISSTVPLTHIDHDEIRAVMSEYKISSADISIRCDATIDDLIDVLEAKSRSYIPAIYVLNKIDSISIEELDLLYRIPNSVPISSEHGWNIDELLEVMWEKLNLVRVYTKPKGKMPDYSAPVVLRANKCTVEDFCNQIHKSIVEQFKVAIVYGKSVKHQPQRVGLAHELADEDVGMYFPVADQASQHPPG

SEQ ID NO: 4018 - DNA, 1842 bp, Myceliophthora thermophilia
atggatcccgtcttcgttgtcacccgcgaagagttacacgatgttcagatggagctgaaacgcatccaccatgtccaattggtgcatggggaacgactccgctcgctggagaaacgtcaggccgacgatgccgcgctcaaatccgtctggaattccccgtttccgagcgttctgggggggacgccgcagcatgggcccgtgcatatgcctgccacggagttgatcgacgatctcgatgacgaggaccagaatctgctcgggagactgcacctcgagacggacgacgaaccgatccggaggggagcggcttcgcgggcgaacagtgtccgattcgacgagagcgccctgcacggagcgaacttcggtcatggcgggcgccattctggtgacttcggtcccagccgccctgggagcggcttcggcgggcaccagatggagcggacatattcccataagtcagacggtagacacagctcggccggacactcggttcactcaatgcattcgggcatatcggggcgtaccagcagcctcggtctggacagtaactttatgattggcggccatgaggatgattccgccctagatatgccggagccacctcccgtgctgtacattctgggttcgccgccatccatcatccgctgctggctgacgaccaacttcacgtccgccggcttgttgtatgccgtggtatgtaccgggtctcagaagtcgacggtcgagtactcgctactgagggagctggacctgaccaacaacatccaccgggatgtggacggcgctcacaggatcacgcttcccgtatttttggctgaggcgcgcgtcacgcaatcaaattccaggtctaccagcccagggccgcatcttcccagcataacagcttcgtttgaggtgacgggcatggaccagcaggagacccccgagtcaaggaaggcgatccgtatcttcatcggcagccatacgttgcgcctgcatggcgccgacatcctgctgtcccggaacctgatgacgctgtacggcagtgaccgtgacaagctttccatcccgtttgtgagacccgaggacgacgccgtgtttaagaatctcgccaccaccaacctggtgtcgagcaagcctaagctgaacgccgccgcccctgaattcattgccggcgagaaatcggtaaacgggtccgttccaaaatccaaggagcagaatacctcggcgtccaaatcggcggaaagcggctctgaggaagtgctgtcgccaacttccccctcgaatcagccaaccaagacgggagctaccagtgcggcatccgaaagcggaggagaagctgataagcgggctccggagccaggtgcgccgccgctgtcgtccggaaaggaaccctctgggtcaaccgaacccagccgtcgagaatccaaccctgccctccggacaccatggcggcaaacggcggccgcccttgcggacagcagcacgccgctgagcgggtatcagccagctgcgcggtcccgcaacatgaaggttctcaagccgaccaagtccagcagcggctcatcgaccaggacgggatcaacacacgatcccacgcccggaacgcgtcccagcgcggatcaaaggcggaagacgcaggcagagggcggctcgggggcggtcaaccggggaagctcgaagcgcgccgtgagcgtatctgccttacccggccttggagaggcgaagcaggcagcgaacggccaggaaccgacggcaaagggcccgttggtggctccgtcaaaagataaccctttgggaagcgcgtcggctttctcctggatagcgccaaccaaaccaaaggggccccctgcggctgactag

SEQ ID NO: 4019 - protein, 613 aa, Myceliophthora thermophilia
MDPVFVVTREELHDVQMELKRIHHVQLVHGERLRSLEKRQADDAALKSVWNSPFPSVLGGTPQHGPVHMPATELIDDLDDEDQNLLGRLHLETDDEPIRRGAASRANSVRFDESALHGANFGHGGRHSGDFGPSRPGSGFGGHQMERTYSHKSDGRHSSAGHSVHSMHSGISGRTSSLGLDSNFMIGGHEDDSALDMPEPPPVLYILGSPPSIIRCWLTTNFTSAGLLYAVVCTGSQKSTVEYSLLRELDLTNNIHRDVDGAHRITLPVFLAEARVTQSNSRSTSPGPHLPSITASFEVTGMDQQETPESRKAIRIFIGSHTLRLHGADILLSRNLMTLYGSDRDKLSIPFVRPEDDAVFKNLATTNLVSSKPKLNAAAPEFIAGEKSVNGSVPKSKEQNTSASKSAESGSEEVLSPTSPSNQPTKTGATSAASESGGEADKRAPEPGAPPLSSGKEPSGSTEPSRRESNPALRTPWRQTAAALADSSTPLSGYQPAARSRNMKVLKPTKSSSGSSTRTGSTHDPTPGTRPSADQRRKTQAEGGSGAVNRGSSKRAVSVSALPGLGEAKQAANGQEPTAKGPLVAPSKDNPLGSASAFSWIAPTKPKGPPAAD

SEQ ID NO: 4020 - DNA, 651 bp, Myceliophthora thermophilia
atgaccacacctccccctgaacggcggttccagagacctgccgtcttcgtctgcgacatccaagagaagttccggcccaccatttacgagttcgacaaagtcatcctcacggcgcgcaagctcctcatcgccgccacggcgctcaagattcccatcttcgtcaccacgcagaaccgcccccgcctgggcgacaccgtcgccgagctgcagccgttcctggcggccgcgggcgccctcgtccaggccgacgtggacaagacgcgcttcagcatgtggctcgaccccatctcgtcccatccccacttcgcctcgtcttctccgtcctccccctccccctccgggtgcgaggtcgccatcgtcggcatcgagtcgcacatctgcgtcacgcagaccgcgctggacctgctcgccgccggccacaaggtgtacatcctcgccgatggggtcagcagctccaaccgggaagaggtcggcatcgccctcgaccggttgcggcaggccggcgccgtggtcacgaccagcgagagctggatctacgaatgcatgggggatgccaagattccagagttcaagcagattgttggggtggtcaaggatacggtgggggatacgagggctgcgctgaaaggcttgctgggcagcaagatgtaa

SEQ ID NO: 4021 - protein, 216 aa, Myceliophthora thermophilia
MTTPPPERRFQRPAVFVCDIQEKFRPTIYEFDKVILTARKLLIAATALKIPIFVTTQNRPRLGDTVAELQPFLAAAGALVQADVDKTRFSMWLDPISSHPHFASSSPSSPSPSGCEVAIVGIESHICVTQTALDLLAAGHKVYILADGVSSSNREEVGIALDRLRQAGAVVTTSESWIYECMGDAKIPEFKQIVGVVKDTVGDTRAALKGLLGSKM

SEQ ID NO: 4022 - DNA, 1551 bp, Myceliophthora thermophilia
atgtcttccctaatcgggggaatctatccgccgaccctggatgatggtgtggagagagaccagctcgtgcaaaccatcaaggactggaccattgcgaacggccttgctgtacggccccctccggcatttgccgacggtgaattcgaaggggctctggccattagcgccccagtaacactcttcccgagcccgttccccaaagcctgtttcgaggaggccagggccatccaaaccaagtacaatgagctgtacgcccgcatcagccaggatgaggagtacctcggcagtcttgtgcaggaggtcgctggaggcgacgacttcattgccaacctgtggaaggttcacctgcgggtgaaagaggagggctatgtccagaatctcagcctcggcctcttccggtccgactacatggtccaccaggatggcgacaacctccagatcaagcaagtcgagttcaacaccatcgcatcctcgtttggggggctttccactcagacttctttgctccacaaacatctcgccaaaaccgagtatcccctcctaaaggaaccggtgtcgctcccccctgccgacctcccccccaatcccagcgcggagggcctcgccgcaggactagcagctgcattccacgcctacgggaagtccgcccttggccaccagacctgcgtcctcttcctcgtccaggacgaggagcgcaacgtcttcgaccagcgccacttggaatacgccctccggtcctctggcgcggaacccatccccgtcttccgcctccccttctctcagatcctcacgcatacaaccatccccccttcctccccgggccgtcagctcctctaccacccaccccagaaccctgcccgcaccttcgaggtcgccgtcgtctacctccgcgccggatacggcccagcggactacccgtcccagtcggcctgggaagcacgctaccagatcgagcgctcggcagccatcgcctgcccgtcggtgctcacccagctggccggcatgaagaaggtccagcaggtactcgccaccccggaagccgtcacctccggcccgggcgccctgcgccgcttcgtccccgacagcgacggcgacgccacctaccaggccctctggaagacgttcgccaacatctaccccctggacaccagccccgcggggctggaggcgcggcggctcgcgacggacccggaggagtgcaagcggttcgtcatgaagccgcagcgcgagggcggcgggaacaacttctaccggacggccatcccgcggaggctgagcgagatccccgagagccactggggttcgtacattctgatggagctgatcacgccgccgcccctggtgaacaccattctgcggaacgggaagctggagcacggcggtgtcatctgcgagctggggatctacgggacgtgcctgtgggaccagaagactggggcggttctgcggaacgaggaaagcgggtacctgttgcggacaaagggcgatcagagcgaggaagggggtgtagcggcggggtacgggtgtatggattcttgccggttggtctag

SEQ ID NO: 4023 - protein, 516 aa, Myceliophthora thermophilia
MSSLIGGIYPPTLDDGVERDQLVQTIKDWTIANGLAVRPPPAFADGEFEGALAISAPVTLFPSPFPKACFEEARAIQTKYNELYARISQDEEYLGSLVQEVAGGDDFIANLWKVHLRVKEEGYVQNLSLGLFRSDYMVHQDGDNLQIKQVEFNTIASSFGGLSTQTSLLHKHLAKTEYPLLKEPVSLPPADLPPNPSAEGLAAGLAAAFHAYGKSALGHQTCVLFLVQDEERNVFDQRHLEYALRSSGAEPIPVFRLPFSQILTHTTIPPSSPGRQLLYHPPQNPARTFEVAVVYLRAGYGPADYPSQSAWEARYQIERSAAIACPSVLTQLAGMKKVQQVLATPEAVTSGPGALRRFVPDSDGDATYQALWKTFANIYPLDTSPAGLEARRLATDPEECKRFVMKPQREGGGNNFYRTAIPRRLSEIPESHWGSYILMELITPPPLVNTILRNGKLEHGGVICELGIYGTCLWDQKTGAVLRNEESGYLLRTKGDQSEEGGVAAGYGCMDSCRLV

SEQ ID NO: 4024 - DNA, 390 bp, Myceliophthora thermophilia
atgtccgttctctctcatcatggcgaggtggatgctgtcgagccccgcagccgacgcggaactcccggccaccggcataagctctggacatgccacgccagtgatggttgggtccttttcgtgctcagaaaatcaattagatccttctcttgcgtggcagctcaaggactgcgtttggaggcagctgcccggttgcccgccagatcgagaagggctgcaaggctcgggacaaagcagctgtcaccagtgacgccagttgcaggaccgcccaatgcaaagcgggacaacaggccgggcccccactgctccacaccaggatcccctccacccagccggctctgccctgcatcagatgttcccaacagtgtgcgcgagtcgggagctttttag

SEQ ID NO: 4025 - protein, 129 aa, Myceliophthora thermophilia
MSVLSHHGEVDAVEPRSRRGTPGHRHKLWTCHASDGWVLFVLRKSIRSFSCVAAQGLRLEAAARLPARSRRAARLGTKQLSPVTPVAGPPNAKRDNRPGPHCSTPGSPPPSRLCPASDVPNSVRESGAF

SEQ ID NO: 4026 - DNA, 351 bp, Myceliophthora thermophilia
atggccgacgttgagatgaccgatgcgcccgcctcagtagcagttgtcaagaataagggcgccgccgacggcgaagggaaagagggaaagaagcggtttgagtggaacgctgtcgctttgtgggcatgggacattgtcgtcgacaactgcgctatctgcaggaaccacattatggatctctgcatcgagtgtcaagcgaaccaagcgtccgctaccagcgaggaatgcactgttgcttggggtatttgcaaccacgcattccatttccactgcatttctagatggctcaaggcgcgccaagtctgtccactcgacaacagggactgggaattccagaagtatggcaggtag

SEQ ID NO: 4027 - protein, 116 aa, Myceliophthora thermophilia
MADVEMTDAPASVAVVKNKGAADGEGKEGKKRFEWNAVALWAWDIVVDNCAICRNHIMDLCIECQANQASATSEECTVAWGICNHAFHFHCISRWLKARQVCPLDNRDWEFQKYGR

SEQ ID NO: 4028 - DNA, 1299 bp, Myceliophthora thermophilia
atggaacaacaaacagcacagctgccacccaaaaagagcacgccagctcggcgacgccccatgcggcctgtgaactcgcccgctcgcaagacgtacgcctcagagaacgacatgccgagcgaagccacattcccactcgagatcgcggggcctttcacgcccaggaagtccgcctcaaacagctcggcaccgccatcgcagcccaatcaaggcaaatctaaaccgcggaacgggaacaagggacgggtcaagcaagtctcgtcgccggggcctggcaagcaagggcggacaacacctccgcactcaacaacatccaagccaattgctacagccgcttttgccggcgcgacattccacgcgtccccggctccctcctccctcccgatcccaagcttcttgtccaaggccctggactcgccctcagtgcaggaaacagaccatgccagtcgcgagccttcgccgcctgcgaccgattccgaggcagcccccacaccgcagcaccgtctgctatccgcaaatgatgcccgacaagagtcaccccttgatatcttcttccgtgcagaccgggctgagaaagagcgggcgcgccgcgcaagctctgccaacattctcgggcaacgtccgattcctctttctcctccctctcatgtacgctctccggcggagcccagaactgtccccagcggacggtttggtactggcacccgccggcctgtgccccagcgcaattcatccgccggcatccccgccagcgagcttgatggcacacccgaaacggtgattgggccggcgctctccaagccttaccaggaacgtattcgcgaggccatatccaacaagaagcagggcgacgccgctcagaagcccacgccactgcaggaccaggcggcaatagacatgagcgagcggctgaagcagtttctggctataccctcgatccggagcgggcaacagccttctcaagcgcccgagacgtccccgcaaggacctactgatgcgccgccgcatcctttctcgtcagggccccagcctccgcacccatctggcttcctgcctgctttctcggtgggatcccagccccctccatctgccgcttaccacacgccaccaccctttgccacggggactcaacacccggtcctcgcaccttcggctccggtctctatgacttctccggctgtgaacgggagtcgttcggccgacattttgcacatggaggagagcctgcggcgcatgctgaagctgaacctcagcccggccccggcaggacctcagccgactaagtaccagagctcctga

SEQ ID NO: 4029 - protein, 432 aa, Myceliophthora thermophilia
MEQQTAQLPPKKSTPARRRPMRPVNSPARKTYASENDMPSEATFPLEIAGPFTPRKSASNSSAPPSQPNQGKSKPRNGNKGRVKQVSSPGPGKQGRTTPPHSTTSKPIATAAFAGATFHASPAPSSLPIPSFLSKALDSPSVQETDHASREPSPPATDSEAAPTPQHRLLSANDARQESPLDIFFRADRAEKERARRASSANILGQRPIPLSPPSHVRSPAEPRTVPSGRFGTGTRRPVPQRNSSAGIPASELDGTPETVIGPALSKPYQERIREAISNKKQGDAAQKPTPLQDQAAIDMSERLKQFLAIPSIRSGQQPSQAPETSPQGPTDAPPHPFSSGPQPPHPSGFLPAFSVGSQPPPSAAYHTPPPFATGTQHPVLAPSAPVSMTSPAVNGSRSADILHMEESLRRMLKLNLSPAPAGPQPTKYQSS

SEQ ID NO: 4030 - DNA, 3612 bp, Myceliophthora thermophilia
atggcaggcggagacacccaacacggcgctgaggcccccggccgcgagaggctcgcgccgactttgcaaatacccaagaacaggagcaccgggaacctcgggacggtggccgatgacgacagggctggaaggcctcgcatccgcttctcgttcgatgccggtgccgccgcggtagagcacgaaacaatgacaagaagctcgatcgtaacggaccatgacctgggcctgggcatgtccgggctccggcgcatacgtcaacagcccaatgcgttgcggacgcccaccatgccgctcgcgggcaatcggacgccctccctcggcgattcggcaaggtccgcctccacgagcgtctccctcgaccactccgtgtcgctttcttcatacccggcctctcccacgtttgccgatgatctctcccgctttccgtcagaatcactgcattccttctccttcgcccatcagtccgaagacttgatccacagccgtcaaaacgtccttaagcggtccatggagtttatgagggaccggatggcgtggtcggcctcgttgaacgccgggatagcgagtgctcaagcacgcgcgacgggtgatgtggcagcccagaccatgctggatctgctgtcacgagcccatctagtcggcgctgggaaccttcccaacacggaccctaacctcctcaccgggccattaacggggccggcaacgacctcgaatgcaaacgtatttgagaaaggctttgctccgaggacgtcgagccccgagcccattgacaagacgcccctcgtctctccggcctcttcggcgccgccgcctgcggtcgtcaaggaccagggtcctcagcgggatgcttccgctcctgctgctgcggactctcagcccaacccaccaccgggcgagaaccagggttccgagagctcgtcgaggacgcccacgaatgaaagcggcacgagtggtacgacggcaaagagttccccgccgccttcgagacgccctagcgtgctgaaacggaccatgaccgacacagatactgcccaggtatcggttcagcagaaactcatggatgtaatggcgcagccgtatcatgcggccgagcccctgccgcagcctcagcacaggtcatcgctgcccttttcccctgcgatgaatccgccgccgtccgccgtctctaccctacacaaccacccattaagggtcgcgcccgctgcacaagcaatcttcaccaccacgtcaaaaccgccatggaccattgttaccgccaacgatcttgcttgcttgctgttcggcgtcacagccgccgagatcaggaagatggggattctggaggtcgtccaggaggaacggagggcctggctggttggcaagttgcagaaaggggctggagaggatgtaggggatgtctctgagcccgaaattgcccaaccaaaccccgccgtgcagacgtccaagctgcttggagggcgctccggcgggattacggcaaaactcctgagcaagccaaattcgaggtcgcagacgcccaagactggtaggcgacccgcgaccattcacaacggcgacccgaggccaccgaagccaggacagggtcaccgccagaacagcaagtccaggggcgtgcttctctgtggagatgttgtcccaatccagaaacgcaacggcgctaccggttctgccagtttttgggtcattgagaagaaggctggcctgatctgggttgtggaagagatccacgaggacgtcgcatacgtcgacgtcgacgaagatggcctggttctgaagttgtccggtgctctgggccccatttggggcaatgagaacctgcagccaggtcaggatatcggattgctcatccctcgcatttcgcggcagggcatcgacccgcggttcggcgaactcgactatcgggagattgccaggaaaaagtactacacttgccgcactagccagggagtcaacatcccggcaacgatagaacaggtcaagggctccacacagctccgcgtgtccagctttccgcacatcgccggtattgtcgtcgtatgtcctgaaaagctcaccatcaagagcacgaattccgtcttctgtggggcgctctttggctacgagaagccagacggtatgtcgatcaaccatctagtgcccaactttgacaagatactccgcatcctcaccgaacgggacggcgtccacctcgtcgatggtattgtggttcccgagcactcgttccggaaagcctctgcgtatctagccctagaggaggggcggccggacgctgctgcggggttcttacggcccgagagcctcccagcgcggcaccgggacggctcccagctcaggatcgacatacaaatgcgagttgtaacgagcgagaagcaagtgacaacgcacaacgatgctgtttcggagaacagcgatggcgagtcgtcagccggcgagggctcggataagtttgtcgtgtcgcaaacggagatggtctacgccctgtggatcacgtattcgaggcacctccacgcttcgcggacaagcaagggcgtgccatcaccacagcagccttctggaacggccacaccactgtaccaaccatctccaggccaaacaccggcccacacgccgctggagatggtatccgattcagaggagtcgcagaagggggagccagagccaaggccgccctcgctggctcggcagttgaaagaggctgccgccacagcggcgggcaagttaacaggctcgcagaaggcatccgaatctcagccacctcagccggccaccccggcgaagccggcagagccaccccacaagaagaccatagacgactttatcatcctcgaagacatgggccagggcgcctacggccaagtcaaattggcgcggtaccgcagcaccggcaagacgtgcgtcctcaagtatgtcacgaaacgccgcattctcgtggacacatggacgcgcgaccgtaggctgggcaccgtccctctcgagatccacgtactggactatctgcggcgcgacgggctgcgacaccccaacatcgtggagatggaagacttctttgaggacagcgtcaactactacatcgagatggcacctcatggcctccccgggatggacctattcgattatatcgagctgcgcaccaatatggaggagcaagagtgccgcagcatcttcgtgcaggtcgcacgcgccgtccaccacctgcacaccaaggcgctggttgtacaccgcgacatcaaggacgagaacgtcatcctggacggcgagggccgcatcaagctgatcgatttcgggagcgcagcatacatcaagagcggtccctttgatgtctttgtgggcaccattgattacgcggcccccgaggtccttgccggtaagccctacggcggcgaagagcaggatgtctgggcccttggtatcctgctctataccatcatctacaaggagaaccccttctacagtatcgacgagatcatggaccgcgatttgcgtgtgccctacaccatcagcgacgagagcatcgatctgatccgcaagatgttgaatcgggacgtccaggagcgctacacgatcgaccaggtcctggcacatccttggtgtcgggtggagacggcggtatga

SEQ ID NO: 4031 - protein, 1203 aa, Myceliophthora thermophilia
MAGGDTQHGAEAPGRERLAPTLQIPKNRSTGNLGTVADDDRAGRPRIRFSFDAGAAAVEHETMTRSSIVTDHDLGLGMSGLRRIRQQPNALRTPTMPLAGNRTPSLGDSARSASTSVSLDHSVSLSSYPASPTFADDLSRFPSESLHSFSFAHQSEDLIHSRQNVLKRSMEFMRDRMAWSASLNAGIASAQARATGDVAAQTMLDLLSRAHLVGAGNLPNTDPNLLTGPLTGPATTSNANVFEKGFAPRTSSPEPIDKTPLVSPASSAPPPAVVKDQGPQRDASAPAAADSQPNPPPGENQGSESSSRTPTNESGTSGTTAKSSPPPSRRPSVLKRTMTDTDTAQVSVQQKLMDVMAQPYHAAEPLPQPQHRSSLPFSPAMNPPPSAVSTLHNHPLRVAPAAQAIFTTTSKPPWTIVTANDLACLLFGVTAAEIRKMGILEVVQEERRAWLVGKLQKGAGEDVGDVSEPEIAQPNPAVQTSKLLGGRSGGITAKLLSKPNSRSQTPKTGRRPATIHNGDPRPPKPGQGHRQNSKSRGVLLCGDVVPIQKRNGATGSASFWVIEKKAGLIWVVEEIHEDVAYVDVDEDGLVLKLSGALGPIWGNENLQPGQDIGLLIPRISRQGIDPRFGELDYREIARKKYYTCRTSQGVNIPATIEQVKGSTQLRVSSFPHIAGIVVVCPEKLTIKSTNSVFCGALFGYEKPDGMSINHLVPNFDKILRILTERDGVHLVDGIVVPEHSFRKASAYLALEEGRPDAAAGFLRPESLPARHRDGSQLRIDIQMRVVTSEKQVTTHNDAVSENSDGESSAGEGSDKFVVSQTEMVYALWITYSRHLHASRTSKGVPSPQQPSGTATPLYQPSPGQTPAHTPLEMVSDSEESQKGEPEPRPPSLARQLKEAAATAAGKLTGSQKASESQPPQPATPAKPAEPPHKKTIDDFIILEDMGQGAYGQVKLARYRSTGKTCVLKYVTKRRILVDTWTRDRRLGTVPLEIHVLDYLRRDGLRHPNIVEMEDFFEDSVNYYIEMAPHGLPGMDLFDYIELRTNMEEQECRSIFVQVARAVHHLHTKALVVHRDIKDENVILDGEGRIKLIDFGSAAYIKSGPFDVFVGTIDYAAPEVLAGKPYGGEEQDVWALGILLYTIIYKENPFYSIDEIMDRDLRVPYTISDESIDLIRKMLNRDVQERYTIDQVLAHPWCRVETAV

SEQ ID NO: 4032 - DNA, 852 bp, Myceliophthora thermophilia
atgggaaacaagagggctcgttcagacacagagggccagccccatgaggatgcggcgaggaagcgaatgaagccgaaccggccacacaaaaagaagcaaaagaagcccgtcgacatggagagcctcgctgccatcaagaagcgtgccagggcaatcgagagacttctttcgcgcgacaacctgaagattccggcagacaaacaaaatgagctcgagcgggagctggcggcgcacaagcaacgcatcgaggaagctcggaggaagaaggagaggagtacgatgatcaagaagtaccatatggtccggttcttcgaaaggaaaaaggccatgcgattcgtaaagcagctcgagaggaaggtagcgcaggccacggacccagacgaggttgctcagctcaaggccgacctccacgttgcccaagtcgacatggactatgcgagatatttcccgttcatggagccatatgtcagcctgtatgccgcggctgctgctacggacagggacgagaccaacgcggccgcgcactacctgcggaccccgcgaccgcccatgtgggagctcatcgagaagacgagggaggagggccaggcggcgctggagaagctgcagaataggtggccacaggcgaacgcgcgttccgacacccctccgcggtcgccagcgaagcaggctgcgaacaagcagcactcggcaaggaagggcaagaaaggagcgcaggagccagggtcgaaggggtcaaggtccggctcgaccaaggtggaacagaaacactccagaaagaacaaggacgaggacggtgacggtgacagtgacgatagtagcgatagtggtgggttcttcgaggaggattga

SEQ ID NO: 4033 - protein, 283 aa, Myceliophthora thermophilia
MGNKRARSDTEGQPHEDAARKRMKPNRPHKKKQKKPVDMESLAAIKKRARAIERLLSRDNLKIPADKQNELERELAAHKQRIEEARRKKERSTMIKKYHMVRFFERKKAMRFVKQLERKVAQATDPDEVAQLKADLHVAQVDMDYARYFPFMEPYVSLYAAAAATDRDETNAAAHYLRTPRPPMWELIEKTREEGQAALEKLQNRWPQANARSDTPPRSPAKQAANKQHSARKGKKGAQEPGSKGSRSGSTKVEQKHSRKNKDEDGDGDSDDSSDSGGFFEED

SEQ ID NO: 4034 - DNA, 786 bp, Myceliophthora thermophilia
atgggcggacaagcgaacctctactcgttcccgaccgtggacgccctggccccggccctccgcgcctatgtcatccactgccaggatgccggcatcgcccgccacggcgtgttcaaggtggccgtgtccggcggctcgctccccaagacgctggcccaggcgctcctggcgtcggccacctcggaggccgacaaggtgaggtgggacaagtgggagatcttcttcgccgacgagcgcgccgtgcccctggaccacgccgactccaactacgggctcctgcgggcggagctgctcgacaagctgcccgccgacggcccgcggccggccgtgcacccgatcgacccgtccctcctcgacgacacgcaggagctcgccgacggctacgagcaggagctcgtcaagagcttcgccggccgcgactcggtccgcctgcccatcttcgacctgatcctcctcggctgcgggcccgacggccacacctgctccctcttccccggccacgagctgctgcgcgagacggccgcctgggtcgcccccatcgaggactcccccaagccgcccccgcgccgggtcaccctcaccctgcccgtcgtgacgcacgccgtcaaggttgccttcgtggccacgggcgccggcaagaaggaggtgatgaaggagatcttcgagcagggcaacggcctgccctgtgccctggtcaacgaagggtgtggcgagcggtgcagctggttcgtggacaatgcggccgtcgagggcgttacgtaccctaggaggccgttcagcttgtga

SEQ ID NO: 4035 - protein, 261 aa, Myceliophthora thermophilia
MGGQANLYSFPTVDALAPALRAYVIHCQDAGIARHGVFKVAVSGGSLPKTLAQALLASATSEADKVRWDKWEIFFADERAVPLDHADSNYGLLRAELLDKLPADGPRPAVHPIDPSLLDDTQELADGYEQELVKSFAGRDSVRLPIFDLILLGCGPDGHTCSLFPGHELLRETAAWVAPIEDSPKPPPRRVTLTLPVVTHAVKVAFVATGAGKKEVMKEIFEQGNGLPCALVNEGCGERCSWFVDNAAVEGVTYPRRPFSL

SEQ ID NO: 4036 - DNA, 924 bp, Myceliophthora thermophilia
atgtcgaaaccaaaatacctcactggcgatagtgccgccattaacgagttcatcgaccgttttgatgtgtttctactggattgcgacggggtaatatggtcaggtgaccatgtgtttgagggcgttcccgagacgctcgagttgttgcgatcgagaggcaaaaaaattgtcttcgtgacaaacaactcgaccaagtccagggaggattacctcaaaaagttcactagccttggcatcccctcgaacgtggaagagatcttcggctcggcctactcctcggccatctacatctcccgcatcctcaagctccagcccccaaagaacaaggttttcgtcatcggcgaggcgggcatcgagcacgagctgcgaagcgagaacattccttttattggcggcaccgacccggccctccggcgggacatcacggagcaggaccgccagggcctcgcggacgggtccctcctcgacccggacgtcggctgcgtgctggccgggctcgacctgcacatcaactacctcaagctcgcgcacgcgctgcagtacatccggcgcggcgccgtcttcctcgccaccaacacggactcgaccttcccgtcgcaccacaccgtctttccgggggccgggtcgatcagcgcgccgctggcatacatgaccggccggcagcctctggcgctggggaagccgagccaggccatgctggacgcgatcgagggcaagttccaactggaccgcgcgcgcgcgtgcatggtgggcgaccggctcgacacggacatcaagtttggcatcgagggccgcctcggcggcacgctggcggtgctgacgggcgtgaacaggccggccgactgggaggcggacgacgccgtggcggtacccgcgttctacgtcgacaagcttagcgacctccgcgccgccgccgagcagtag

SEQ ID NO: 4037 - protein, 307 aa, Myceliophthora thermophilia
MSKPKYLTGDSAAINEFIDRFDVFLLDCDGVIWSGDHVFEGVPETLELLRSRGKKIVFVTNNSTKSREDYLKKFTSLGIPSNVEEIFGSAYSSAIYISRILKLQPPKNKVFVIGEAGIEHELRSENIPFIGGTDPALRRDITEQDRQGLADGSLLDPDVGCVLAGLDLHINYLKLAHALQYIRRGAVFLATNTDSTFPSHHTVFPGAGSISAPLAYMTGRQPLALGKPSQAMLDAIEGKFQLDRARACMVGDRLDTDIKFGIEGRLGGTLAVLTGVNRPADWEADDAVAVPAFYVDKLSDLRAAAEQ

SEQ ID NO: 4038 - DNA, 1086 bp, Myceliophthora thermophilia
atggcgctcccggtcgtgcatacgctggaggagtgcgccgacttctctagggcggtcaagcccttcatcccgcagctctacgacctccccgcaaagctgctcgacgtctttgcggggcacgagaccctacggcagttgtacaccgagacaaacccggtcatctctggctttgccatctcggtgttcctaggtgccgtgtttctcgtagtggctgaaatcaaccgcaactactcgcaggtcgaccgctgctggagcctgttgccgaccctgtacattgcgcactttgacgcgtgggcgcgcctcacgggactgccctctcggcggatcgacgcggcactgcttttcagcaccatttggagtattcgcctcacctataattactggaggaagggaggttacggtatcggccacgaggactacagatgggaaatcatccggcagcaggtccctaaagttgtgtttcacatctttaactggaccttcatctcctttatccagagcatcctgctcttcgccattgccgcgccagtctacaccatccttctagcgtcgaccattgaaccagatctcagcagcgccgacatcgcgtcagtggccgtcgagcttggactcatcctcatcgaatacattgccgacgagcagcaatgggtctaccagtcggcaaagaaacaatacaaggactcggccaaggttccccggggatttgagcaggcggacctcgaccgcggcttcgtcacgtccggcctctgggcgtacagccgtcaccccaatttcgcagccgagcagtccatttggttcgtcctctaccagtggagctgctacgcgagcaagactctgtacaactgggcgggcgcagggccgtcgttcctcatcctgctgttccagggctcgacgtggctgacggagctcatcacggcgggcaagtactccgagtaccgcgactaccaaaagagcgtgggcatgtttacgccgaagggattgtcgccctacaaggggcccggggtaaaggtccccaaagtgatccggacaagcgagctggcgaaaatgcaggagcaaaaggagaagaagaagcagaagcaaaagtga

SEQ ID NO: 4039 - protein, 361 aa, Myceliophthora thermophilia
MALPVVHTLEECADFSRAVKPFIPQLYDLPAKLLDVFAGHETLRQLYTETNPVISGFAISVFLGAVFLVVAEINRNYSQVDRCWSLLPTLYIAHFDAWARLTGLPSRRIDAALLFSTIWSIRLTYNYWRKGGYGIGHEDYRWEIIRQQVPKVVFHIFNWTFISFIQSILLFAIAAPVYTILLASTIEPDLSSADIASVAVELGLILIEYIADEQQWVYQSAKKQYKDSAKVPRGFEQADLDRGFVTSGLWAYSRHPNFAAEQSIWFVLYQWSCYASKTLYNWAGAGPSFLILLFQGSTWLTELITAGKYSEYRDYQKSVGMFTPKGLSPYKGPGVKVPKVIRTSELAKMQEQKEKKKQKQK

SEQ ID NO: 4040 - DNA, 912 bp, Myceliophthora thermophilia
atgcccatcttcaacctcagacctgcggttttcgcaacccgtgggttaccccgagacgacgggacgcacgcaaatttggatcagctcaagcaccattgcgtgcatcgcttcttcccgcgtttcagatgggcaccagcggtcctcgaagagacacagtcggccacatgggcgacgaaggggttcggtttatccttccgtgcagcagtcacgcccgccgaccaaccaccgtcgagtggaggaggtggggggatgctcttggatgttgccgaggatgggaaggaagccgcactactactccacgaatggtcatgctacctgaccttcacctaccctcactcagtcgcggtcacggtccccaagttccctgccgaggggctcaacaagcggttggcggttggcggttggcggttgacgcgcaaaggcacacaccatcaccaacgccgccatttcggaatcacggcaggccaggagaagatgtctcggctgttgctggcgacgccgtcggggaacacatatcggttcccgcccgtcaccatctcaaccaacggcttgcctacctctgtcaccgaggtcccccggtacgggacttcgtactatcgcggaaacgagctcagctttcatatcctccaatctggcgggtacctccctgcttctccgtctgcaatccatcatattctttttatttttacccgttgttacagcgtcggttcggatctcgtcgaccgcgtgatcaaggctcagcgtctcacggcggtcttccttgcaggtgacaaagttcatcgttctgcaaccagagattctgccctgacttttacaacaccacgccggaccgagaagccattggacgcactccgttatcccattgctccaagaggtggtggtggagaggcgccctgggagcacgtggtgtag

SEQ ID NO: 4041 - protein, 303 aa, Myceliophthora thermophilia
MPIFNLRPAVFATRGLPRDDGTHANLDQLKHHCVHRFFPRFRWAPAVLEETQSATWATKGFGLSFRAAVTPADQPPSSGGGGGMLLDVAEDGKEAALLLHEWSCYLTFTYPHSVAVTVPKFPAEGLNKRLAVGGWRLTRKGTHHHQRRHFGITAGQEKMSRLLLATPSGNTYRFPPVTISTNGLPTSVTEVPRYGTSYYRGNELSFHILQSGGYLPASPSAIHHILFIFTRCYSVGSDLVDRVIKAQRLTAVFLAGDKVHRSATRDSALTFTTPRRTEKPLDALRYPIAPRGGGGEAPWEHVV

SEQ ID NO: 4042 - DNA, 2145 bp, Myceliophthora thermophilia
atggcccacgagggcagggaccacggagaccggggctttggcttcggcggcgggggtgtcggaggacatgatgggcctccgccgcgagtcagaggcagacgccccgtcacggactacggcgctaccatcgtccactggatgcgccatcgccaaccccgatataaggggtcgtttgcgggcgagaccgagagaccgagtatcagctacattgtggacgtgagttcttctttttgttattattcgcccctcttctcccctctcctctcctacagaaagtcgcgatcgctcacgcccttccagatgctacctccccacgcaaggacaacgagcgccgcggactcggtgccgtcgcgtcacctgcactcctcactaaataagatcaagcatcccataaacgtggtgcggtggactcccgagggcaggaggttgttgacggcctcgagcagcggggagtttaccctctggaacggcaccggcttcaacttcgagaccatcatgcaggcgcacgactcggccatccgtgccctggcctactctcacagcgacgactggctggtgtctgccgaccacgacggcatcatcaagtactggcagcccaacttcaacaacgtcgagagcatccgcggccacacggaccccatccgggacctcgccttcagccccaccgatgtcaagttcgtcacagcctcggacgactcgaccctgaggatattcgacttcgccgccggagcagccgagtcgacgctcacgggccacggctgggacgccaagagctgcgactggcacccgaccaagggcctcatcgtctcgggttccaaggaccatctggtcaagctctgggatccgcggacgggccggtgcctgacgaccctccacggccacaagaacaccatcaccaagaccctctttgagcgcgtgcgcgggcagtgcctggccacgtcggcccgcgaccagaccgcccgcgtcttcgacctccgcatgatgcgcgacatctgcctcctccgcggccacgacaaggacatctccaccctgacctggcaccccatccaccccaacctcctcagcaccggcggctccgagggctccctcttccactacctcctcgacgagcccaacaccccgccgggccactccgcctccgtcgcgccctacgacgccgccgacccggcctccgccccggcccagaccatctacccggcccaccggatcccctacgcccacgactttgccatctggtctctcgactggcacccgctcggccacatcctggcgtccggctccaacgaccgcatcacgcgcttctgggcgcgcgcccgcccgggcgaggccgacaacttcaacgaccgctaccacatcggcgaggccgcggccgaggcccagggcacctgggaccgccgcggccaccgccacatgcggcaggtcgaggaggaacaagagctcgaagacgagatggacggcctggtcgaccagaagatgcccatcaagcaaccgcccggcagcctgccgggcctcggaacagcagcatcatcatcatcagcagcagcagcagcagcagcagcggtggcggcggcaggaggagcaatcccctgcttattctgcttgcagcagcagcagcagcagcagcggcggcggcggcaggaggagcaatccccggcctacccggcctgcggcagcggcagcggcagcggcagcagcgccgcgcagctgcccttcccactcccgccgccgcctccgcccccggccatcgccagcatgctggtcggcgacggcaagaacccgcccgacttcgcggccatcgccgagatgatgaagaagcacggcatcgtcccgccccccccgcccccgcctccgcccggccgggtcctgccgcccggtctgatcccgcccccgcccccgccccccggcttcccgctgccgcacggcttccccccgcccccgccgcatctggcggccggtgccgctgccggtgccggtgccggaggggaccagcatgggagcgggtccggaaacgggaacgggaatgggaacgatggtggtggtggtggtggtggtggtgggagcggcaggagaagggcgccgctgccgagccaggaggagagcctgcggatggagcagagcaaggggaattatacccgggtgagatag

SEQ ID NO: 4043 - protein, 714 aa, Myceliophthora thermophilia
MAHEGRDHGDRGFGFGGGGVGGHDGPPPRVRGRRPVTDYGATIVHWMRHRQPRYKGSFAGETERPSISYIVDVSSSFCYYSPLFSPLLSYRKSRSLTPFQMLPPHARTTSAADSVPSRHLHSSLNKIKHPINVVRWTPEGRRLLTASSSGEFTLWNGTGFNFETIMQAHDSAIRALAYSHSDDWLVSADHDGIIKYWQPNFNNVESIRGHTDPIRDLAFSPTDVKFVTASDDSTLRIFDFAAGAAESTLTGHGWDAKSCDWHPTKGLIVSGSKDHLVKLWDPRTGRCLTTLHGHKNTITKTLFERVRGQCLATSARDQTARVFDLRMMRDICLLRGHDKDISTLTWHPIHPNLLSTGGSEGSLFHYLLDEPNTPPGHSASVAPYDAADPASAPAQTIYPAHRIPYAHDFAIWSLDWHPLGHILASGSNDRITRFWARARPGEADNFNDRYHIGEAAAEAQGTWDRRGHRHMRQVEEEQELEDEMDGLVDQKMPIKQPPGSLPGLGTAASSSSAAAAAAAAVAAAGGAIPCLFCLQQQQQQQRRRRQEEQSPAYPACGSGSGSGSSAAQLPFPLPPPPPPPAIASMLVGDGKNPPDFAAIAEMMKKHGIVPPPPPPPPPGRVLPPGLIPPPPPPPGFPLPHGFPPPPPHLAAGAAAGAGAGGDQHGSGSGNGNGNGNDGGGGGGGGGSGRRRAPLPSQEESLRMEQSKGNYTRVR

SEQ ID NO: 4044 - DNA, 4407 bp, Myceliophthora thermophilia
atggccagtgtccagatgccgcctgcggtgcaaccggggtccgccatcccggcgggcatgacccagcagcaagcccaggaagtctatatgcgattccaacagatgaagaagcagggcgttcctagcaatgaccccgagttcatcaagactcagtccatccttgctgccctccagcgccatagcgagttgcggaaacagcagttacagatgcagcagcaaatgcaacaacaacagcagcagcagcagcagcaacagcagcaggccatgcaaaacggggcgaatggaattgtcaatgggacccaacctggtcgtcccgggcagcccgccacgacgcaaacgacaatgcctccctctacaacttcgctcggcgcgtccgccctgccggcaacctcgggcgcccctgctgccaacactacgacagctgcgccggcgcagggccaggccagtcagtttacacaagcccagctcaaccttctctggacacagatcaaggctttcaggatgcttggcaagaatgccggcgtccccatccagatgcagagggcgatatttgaacacagagcgcggcgccgcatgtcgttggcaaaacaaggcacgcaatcccccaccaccgcgaatcccccctcagacgcccccagtcaggacggcccgaaacccggccccaatggagctgatgcccaagctgaagctccatccgtcccgcagcccaagtcattcaagacggtcaagtctccgtatgacggtgggctggtacgtcaaaccatctcttacatcgaccatggtcgccggaagaaccgtcttatcatcccgggaatcttcccaacggggatagacttcgagcagctgagggccgatcgcgagaagattgtgttcaaccgcatgagcgcaagatacgcggagctgaagtcgctgcccggcaacctggcacactgggatgcgtcccaagattctctcgtggcggacgacacggctaagaggaaggctatcatcgagatgaagaagctggctctctactcgaagcagcgggcgctgagggacaggatcgggaagcagatgatgcactatgacaacttggccatgaccaccaaccgagccgcctatcgccgcatgaagaaacaaaacgtccgcgaggctcgcgtcaccgaaaagctggagaagcaacaacgtgacgcgcgcgagaaccgggagcgcaagagacacatcgactttttgcaggctgtctataaccaccggaacgaggttctcaatgccggccaggttcagcgctcaaagacacagaggctcagtcgccttatgtatgctcaccatttcaacatcgagaaggaagagcagaagaggatcgagaggacagccaagcagcgtctgcaggcgctcaaggcgaacgacgaagaggcgtacctcaagctgctcgaccaggccaaggatacccgcatcacccacttgctccgccaaaccgatggcttcttgaaacagctcgcctcttctgttcgcgctcagcagcggcaagccgctgagcggtacggcgaacaaatcgatattcctcccgacgagagcgacattgacgaggacgacgaggagagcggccggaagattgattactacgccgttgcccaccgcatcaaagaggaggttacggaacaggccagcatcctggttggcggtactctcaaggagtaccagctcaagggcttgcagtggatgttgtctctctacaacaacaacctcaacggtatccttgctgatgaaatgggtctcggcaagacgatccagacgatcagcttgatcacgtacctgatcgagaagaagcaccaacaaggcccctacctggtcattgtccccctcagtaccctgaccaactggaatctggagttcgacaagtgggcgccttcggtcgccaaggtggtctacaagggtcccccgaacgccaggaagatgcagcaggagaagatccgccaaggcaagttccaggtgctgctcacaacgtacgagtacatcatcaaggatcgtcctctgttgagcaagatcaagtggttccacatgatcatcgacgaaggccaccgtatgaagaacgcaaactccaagctgagcgccacgatccagcagtattacagcacccgattccgcctcattctcacgggtacccctttgcaaaacaaccttgccgagctctgggctatgctcaacttcgtcttgcccaacatcttcaaatctgccaagacgttcgacgagtggttcaacaccccgttcgcaaatactggtggtcaggacaagatggagcttacggaagaagagcaaattcttgtcatccgtcgcttgcataaggtgctgcggccgttcttgctgcgccgtctcaagaaggatgtcgagaaggacctccccgacaagaccgaaaaggtgatcaagtgcaagttctctgccttgcaagcgcggctgtacaagcaaatggtcacgcaccaaaagattgccgtcagcgacgccaatggcggcaagaccggtgcccgcggcttgagcaacatgatcatgcagctgcggaagctctgcaaccacccgttcgtgttcgacgaggtcgagaatcagatgaaccccgccaatgtcagcaacgaccttctgtggcgaacggccggcaagttcgagctcctggacaggatcctcccaaagtacaaagccacgggtcatcgcgtcttgatgttcttccagatgacggccatcatggacatcatggaagacttcctccgattccgcggcctccactatctccgtctcgacggtacaacgaagtcggaagatcggtccgagctcctgcggcagttcaaccagccggactcgccttacttcatgttcctcctgtccactcgtgccggcggtcttggcctgaacctgcagacagcagacacagtcatcatctacgactccgattggaatcctcaccaggatttgcaggcgcaggatcgtgcccaccgtatcggtcaaaagaacgaggtgcggattctgaggctaatcagctctgcatctgtcgaagagaagatcctcgagcgcgcccggttcaagctcgacatggatggcaaggtcattcaggcaggtcgtttcgacaacaagtcgtctgaaaccgaccgtgatgctatgctcaggacgctcctcgagaccgcagacatggccgagtctggtgagcaggaggagatggacgatgacgagttgaacatgattcttgcccggaacgaagaggaactggccatcttccagaaactggatgaggagaggtcgcgcgaccccatctacggcactgcgcctggctgccaaggagtcccgcgtctgatgacggaggacgagctgccagacatctacctcaacgagggcaacccggtcgaggaagaagtggagatggccctgggtcgtggagcccgtgagcgtaccaaggttaagtacgacgatgggcttacggaggagcaatggctcatggcggtcgacgatgatgaggacacgcccgaagccgccgcggcgcggaaggcagcccgcagggagaagcgtgagctgaacaagttgaggcggaagggcctcctgaccgggtccatggagaattcgccggcggccagccgcgctagcaccgaggatgccgagacgccggtgaaaaaacgcgggcgcaagccgggcagcaagaaccaggacaagcgcaaggccgaggaaggtgacgacgagcctccggctaagaagcgccgcggaccgcagggacgtccaagggcagttggcctgaacgggtcggataaccggctcgcacccgaagtgcgcgagaagctgcagaagagtctcaagcgtatctttgacggcctgatgaaccttgaagtggacgatgatgagcctcaagagaaccccgacggcgatgacgacggtccgccgaagcggctcatcattgggccattcgttaagctcccgcccaagcgtgattggggcgactattacctcatcattgccaacccgatctgcatgaacgacatccagaagaagatcaagagggaggagtaccagagccttggcgacatgcgcaaggatctcgacctgatggtgtccaattgccggacgttcaacgaggagagcagcggaatctgccaggacgtgaacttgattgagacatatttcaaagagcaattcgaaaaggaactctccgagaacccggacctgcgtgcactggaggacccgtccgcagcggcagccgctggatctgccaccaaagacggctcagtcgcaccgtcgacggcggcaactgacgggacacctcaaccgacgcccagtgggccgacgaggatcaagttggtctcgaactcgtccagcgccggtgccggtgccagcgcctcgaatggcggaggcagccaggctaatggcggcagcggtggcgcgcagagcgatgaggaataa

SEQ ID NO: 4045 - protein, 1468 aa, Myceliophthora thermophilia
MASVQMPPAVQPGSAIPAGMTQQQAQEVYMRFQQMKKQGVPSNDPEFIKTQSILAALQRHSELRKQQLQMQQQMQQQQQQQQQQQQQAMQNGANGIVNGTQPGRPGQPATTQTTMPPSTTSLGASALPATSGAPAANTTTAAPAQGQASQFTQAQLNLLWTQIKAFRMLGKNAGVPIQMQRAIFEHRARRRMSLAKQGTQSPTTANPPSDAPSQDGPKPGPNGADAQAEAPSVPQPKSFKTVKSPYDGGLVRQTISYIDHGRRKNRLIIPGIFPTGIDFEQLRADREKIVFNRMSARYAELKSLPGNLAHWDASQDSLVADDTAKRKAIIEMKKLALYSKQRALRDRIGKQMMHYDNLAMTTNRAAYRRMKKQNVREARVTEKLEKQQRDARENRERKRHIDFLQAVYNHRNEVLNAGQVQRSKTQRLSRLMYAHHFNIEKEEQKRIERTAKQRLQALKANDEEAYLKLLDQAKDTRITHLLRQTDGFLKQLASSVRAQQRQAAERYGEQIDIPPDESDIDEDDEESGRKIDYYAVAHRIKEEVTEQASILVGGTLKEYQLKGLQWMLSLYNNNLNGILADEMGLGKTIQTISLITYLIEKKHQQGPYLVIVPLSTLTNWNLEFDKWAPSVAKVVYKGPPNARKMQQEKIRQGKFQVLLTTYEYIIKDRPLLSKIKWFHMIIDEGHRMKNANSKLSATIQQYYSTRFRLILTGTPLQNNLAELWAMLNFVLPNIFKSAKTFDEWFNTPFANTGGQDKMELTEEEQILVIRRLHKVLRPFLLRRLKKDVEKDLPDKTEKVIKCKFSALQARLYKQMVTHQKIAVSDANGGKTGARGLSNMIMQLRKLCNHPFVFDEVENQMNPANVSNDLLWRTAGKFELLDRILPKYKATGHRVLMFFQMTAIMDIMEDFLRFRGLHYLRLDGTTKSEDRSELLRQFNQPDSPYFMFLLSTRAGGLGLNLQTADTVIIYDSDWNPHQDLQAQDRAHRIGQKNEVRILRLISSASVEEKILERARFKLDMDGKVIQAGRFDNKSSETDRDAMLRTLLETADMAESGEQEEMDDDELNMILARNEEELAIFQKLDEERSRDPIYGTAPGCQGVPRLMTEDELPDIYLNEGNPVEEEVEMALGRGARERTKVKYDDGLTEEQWLMAVDDDEDTPEAAAARKAARREKRELNKLRRKGLLTGSMENSPAASRASTEDAETPVKKRGRKPGSKNQDKRKAEEGDDEPPAKKRRGPQGRPRAVGLNGSDNRLAPEVREKLQKSLKRIFDGLMNLEVDDDEPQENPDGDDDGPPKRLIIGPFVKLPPKRDWGDYYLIIANPICMNDIQKKIKREEYQSLGDMRKDLDLMVSNCRTFNEESSGICQDVNLIETYFKEQFEKELSENPDLRALEDPSAAAAAGSATKDGSVAPSTAATDGTPQPTPSGPTRIKLVSNSSSAGAGASASNGGGSQANGGSGGAQSDEE

SEQ ID NO: 4046 - DNA, 1770 bp, Myceliophthora thermophilia
atggccgcgccgcaagacctcgccgaccgcaccaaggatgcctccgacctgaaatgctacattgacccgacgtcgggcaaggacgacgcttctgcagatggctccgaggccaagccgtatcagtcgctctactatgcattgttgcaacacctcgacaagccggcgccggtttatctcacccggtcggccgcgcccaaagaggggagtgacggcggcgccgccgccgcccctgcgtgggaggagcccgccaagagcgccatgaagaaggccctgggccgcgtcgacgcctacaagaagaagctggccaaggagcaggcctcggccaggcaggaggaggaggagcgcaagcagcggctcaagaacctcgaggaggccaagaagatcgttctcaaggaggacccgtccctccccccggccgtgcgcatcaagatcaacaacaagtcggtcgagctgggcgacggcaagaccaagaagggcacccgcgtcaaggtgtacgggcgcatccacgagctgcgggtgcagaagacgaccaccttcatcacgctcaaggacggctacggctacctgtcgtgcatcctcccggccggcgacctgaccaagaactacgacgccctcatgttcgcgctcgagacggcgctggtggtatacggcgagatgcgcgccgtgcccgagggcgtcaaggcgcccgacaaccgcgagctccacgtcgactactacaaggtgctgggcgcggccccgagcgacctggacgccatcaccaacaaggtgtccaaggagcaggacccgtgggacgcgcagatgctcgacaaccgccacctggtgctgcgcggcgagaacgcgtcgtcggtgctcaagctgcgcgagttcgtcgagctcgccttcatcgacacctaccgcgagatggagttccgcaaggtgtcccccccggccatggtgcagacccaggtcgagggcggcgcgaccctgttcaagtacgactattacggcgaggaggcgtacctgacccagtcgagccagctgtatctggagacggtcatgcagtcgctgggcaatgtctactgcatcgagaagtccttccgtgccgagaagagtctgacgaggcgccatctgtccgagtatacccacgtggaagccgagctcgacttcatcgagttcaatgacctgctcgaccacctcgaggagatcatctcgcgcgtcgtcgacaaggtgctggcggaggagacgatgcgcgggtacatgaagtcgctcaaccccaacttccagaagccgtcgcggcccttcctgcgcatgaagtacgaggaggccatcgagtggctcaacaagcaggacccgcccatcctcaacgaggagggcaagccgcacgtgttcggcgacgacattgccgaggcggccgagcgccgcatgacggacatcatcaaccggcccatcctgctcacgcacttccccgtcgagatcaaggcgttctacatgaagaaggacccgcaggacccgagggtgaccgaatcggtggacgtgctgatgcccggcgtcggcgagatcgtcggcggctccatgaggatggacaactacgacgagctgatcgaggcgtacaagaagaacggcatctcccacgaaccctactactggtacaccgaccagaggaagtatggctcgtcgccacacggtggatatggcctcggcctggagcgcttcctggcttggatggccaaccagcacactgtccggacatgcagcttgtatccgcgcttcatggggcggtgcaagccttga

SEQ ID NO: 4047 - protein, 589 aa, Myceliophthora thermophilia
MAAPQDLADRTKDASDLKCYIDPTSGKDDASADGSEAKPYQSLYYALLQHLDKPAPVYLTRSAAPKEGSDGGAAAAPAWEEPAKSAMKKALGRVDAYKKKLAKEQASARQEEEERKQRLKNLEEAKKIVLKEDPSLPPAVRIKINNKSVELGDGKTKKGTRVKVYGRIHELRVQKTTTFITLKDGYGYLSCILPAGDLTKNYDALMFALETALVVYGEMRAVPEGVKAPDNRELHVDYYKVLGAAPSDLDAITNKVSKEQDPWDAQMLDNRHLVLRGENASSVLKLREFVELAFIDTYREMEFRKVSPPAMVQTQVEGGATLFKYDYYGEEAYLTQSSQLYLETVMQSLGNVYCIEKSFRAEKSLTRRHLSEYTHVEAELDFIEFNDLLDHLEEIISRVVDKVLAEETMRGYMKSLNPNFQKPSRPFLRMKYEEAIEWLNKQDPPILNEEGKPHVFGDDIAEAAERRMTDIINRPILLTHFPVEIKAFYMKKDPQDPRVTESVDVLMPGVGEIVGGSMRMDNYDELIEAYKKNGISHEPYYWYTDQRKYGSSPHGGYGLGLERFLAWMANQHTVRTCSLYPRFMGRCKP

SEQ ID NO: 4048 - DNA, 291 bp, Myceliophthora thermophilia
atgtgctgggctgctcaacattgctggtgcaaacccatgcgtgtcgcgataagccatcgccgcttgcatgggggaagctgtttcacacctgggtttcatttcgcacagtctgtagtgctgtcatccgaaagttacgttgcatgtggtgaggtcgtcgatcgcccagtcagggggggccagcaagcttatcatttagcttcttccgcactgaataacctggactcgccatcacagcccgtctccggacggttcatcccaagccatgactcattccactcgttccttcgatga

SEQ ID NO: 4049 - protein, 96 aa, Myceliophthora thermophilia
MCWAAQHCWCKPMRVAISHRRLHGGSCFTPGFHFAQSVVLSSESYVACGEVVDRPVRGGQQAYHLASSALNNLDSPSQPVSGRFIPSHDSFHSFLR

SEQ ID NO: 4050 - DNA, 255 bp, Myceliophthora thermophilia
atgcgcgtacccaaacctcttcccgaggacattcacaatgccccgtctagctcgaacctcccgagaaggagtctctctaggaatgtcatcatcatcaaacctgaaacggcgcgatcgcgactgtgccgcaccctcgcgttcgtctcgtccgcctcgtcccaggctgtctttgtctttcggacctggcgcctcgacagtccgcgtggggggcctgggaaaacggagtccatgatgacgagcgttaagtggcactga

SEQ ID NO: 4051 - protein, 84 aa, Myceliophthora thermophilia
MRVPKPLPEDIHNAPSSSNLPRRSLSRNVIIIKPETARSRLCRTLAFVSSASSQAVFVFRTWRLDSPRGGPGKTESMMTSVKWH

SEQ ID NO: 4052 - DNA, 393 bp, Myceliophthora thermophilia
atggtccgcacttccgtcctgcacgatgctctgaacagcatcaacaacgccgagaaggccggcaagcgccaggtcctgatccggccttcgtccaaggtcattgtcaagttcctgcgcgtcatgcagcgtcacggctacattggcgagttcgaggaggttgacaaccaccgcagcggcaagatcgttgtccagctcaacggccgcctcaacaagtgtggtgtcatctctccccgctacaacgtccgcctcgccgagctcgagaagtgggttgtcaagctgctccctgctcgtcagttcggctttgtgatgctcaccacctcggccggcatcatggatcacgaggaggctcgtcgcaagcacgttgctggcaagatcattggcttcttctactag

SEQ ID NO: 4053 - protein, 130 aa, Myceliophthora thermophilia
MVRTSVLHDALNSINNAEKAGKRQVLIRPSSKVIVKFLRVMQRHGYIGEFEEVDNHRSGKIVVQLNGRLNKCGVISPRYNVRLAELEKWVVKLLPARQFGFVMLTTSAGIMDHEEARRKHVAGKIIGFFY

SEQ ID NO: 4054 - DNA, 897 bp, Myceliophthora thermophilia
atgaacgtagcagcagcccgcgtcagtgccctccgcggccttcggccggtggcttcccgcttccagccgagcactctcccgcagattgcccgctccttctcggcgtcggcccgtcgcagctacgagtatatcgaggtctctgagccgcgccccggcgttgggcaagtgaccctcaaccgtcccaaggcgctcaacgcgctctgctccccgctcatcggcgagctcaacacggccctgcgcgagttccaggcgtcgccgaccgtggccgccgtcgtgctcaccgggtcggagcgggccttcgccgccggcgccgacatcaaggagatggccccgctgaccttcagcgaggcgtacagcaagtcgttcatcgagtcgtggtccgacctgacgacggcgctcaagaagccgctcatcgccgccgtctcgggccacgccctcggcggcggctgcgagctcgccctcatggccgacatcctctactgcaccgcaacggccaacttcggccagcccgagatcaagctcggcaccatccccggcgccggcggcagccagcggctgacccgcgccgtcggcaagagcaaggccatggagctgatcctgacgggcaagtccttcaccggcgaggaggccgagcgctggggcgtcgccgcccgcgtcttccctacctacgaggccctcctggagggtgcgctcaagacggccgagaccatcgccggctactccaaggtggccgtgcaggcggccaaggaagtggtcaacaagagccaggacctggcgctgcgggacggtgtcgagtatgagaggagggtcttccacgccctgtttggcagtcaggaccagaagatcgggatgaaggcgtttgcggagaagaagaagcccgagtggagccatcaatag

SEQ ID NO: 4055 - protein, 298 aa, Myceliophthora thermophilia
MNVAAARVSALRGLRPVASRFQPSTLPQIARSFSASARRSYEYIEVSEPRPGVGQVTLNRPKALNALCSPLIGELNTALREFQASPTVAAVVLTGSERAFAAGADIKEMAPLTFSEAYSKSFIESWSDLTTALKKPLIAAVSGHALGGGCELALMADILYCTATANFGQPEIKLGTIPGAGGSQRLTRAVGKSKAMELILTGKSFTGEEAERWGVAARVFPTYEALLEGALKTAETIAGYSKVAVQAAKEVVNKSQDLALRDGVEYERRVFHALFGSQDQKIGMKAFAEKKKPEWSHQ

SEQ ID NO: 4056 - DNA, 1182 bp, Myceliophthora thermophilia
atggacgaccactcttccaaacatcgccttgtcgacatccacacgcacatgtacccccccgagtacgtcgacatactctcctcgcgcaccaccatccccctcgtgcgcactttcccctcctcccccgatccgcgcctcatcctgctagaatccgagatcccttccctcgagcgcgccctggccgacccggacgcgcccctccccggccgcccgctgaccaagcacttcacctcgctccccgccaagctcgccttcatggcgcgccacgggatcgacacgtcggtcctctcgctcgccaacccctggctggacttcctgcccgccaccgaagaggccgcgcgcacggcccgccgcatcaacgactcgttcgaggccatgtgcgccgcccacccgggcaggctcttcttcttcggcaccctgcccctcaccgcgcccccgcccgccatcctcgagtcggtcgcccacctggccgccctgccccactgccgcggcgtcgtcctcggcacgggcggtctcgccggcggcgggatggacgacccggccctgctgcccgtcctgcgcgccctcgccgacgccggcctgcccgtcttcctgcacccgcactacggcctgcccaacgccgtgttcgggccgcgctccgcgtccggcgagtacggccacgtgctgccgctggcgctggggttcccgatggagacgacggtcgccgtggcgcgcatgttcctggccggcgtgttcgacgccgtgccccggctggagatgatcctggcgcactccggggggacgctgcccttcttggcgggcaggctggagagctgtgtcgcgcacgacgcggcgctcgtcgggaagaaccacgcgggggcgggagcggagaaagggaggaggaggaggaggacggtgtgggaggtgttgagggagcagatctatctggacgctgtcatctatagtgaggtgggcctaaaagctgcggcagaggccagtggcggggcggagaggttgatgttcgggacggaccatccgttctttccgcctgttggggagggggcagacgcggaaggggagtgggagagcgtcaggctgaatgcggaagccgtaaacaaggcgcttggggatgggagtgagcaggcggcgatggtcatgggcgggaatgcggtcagggtgctgcggttgtatgatgacgcttag

SEQ ID NO: 4057 - protein, 393 aa, Myceliophthora thermophilia
MDDHSSKHRLVDIHTHMYPPEYVDILSSRTTIPLVRTFPSSPDPRLILLESEIPSLERALADPDAPLPGRPLTKHFTSLPAKLAFMARHGIDTSVLSLANPWLDFLPATEEAARTARRINDSFEAMCAAHPGRLFFFGTLPLTAPPPAILESVAHLAALPHCRGVVLGTGGLAGGGMDDPALLPVLRALADAGLPVFLHPHYGLPNAVFGPRSASGEYGHVLPLALGFPMETTVAVARMFLAGVFDAVPRLEMILAHSGGTLPFLAGRLESCVAHDAALVGKNHAGAGAEKGRRRRRTVWEVLREQIYLDAVIYSEVGLKAAAEASGGAERLMFGTDHPFFPPVGEGADAEGEWESVRLNAEAVNKALGDGSEQAAMVMGGNAVRVLRLYDDA

SEQ ID NO: 4058 - DNA, 2574 bp, Myceliophthora thermophilia
atgcgaccgctcactggcgacgacgcttcagcgcgttcccgcacctccgaccgcacctccgaccccgatccgctctcgaccttccgcctcccggccgcgccccagatgaccttcactctgggcgacgagtccaccattggcccatcgtcccaaggcccgactattccttcccggcgcgcaaaggaacacggggccgtcccgcataccgagcagcaccccgagcaccccgagcactccaagccccgaatcccgtcgcatctcgactttgaaaggaccaaggagcccgccacaacaacgcgaccccccggctccaaagggggcaccatcgacaccctccgacaagagggctacgacctctcgcagcccgtctcgcctctcccccgctccaccgacactccaaacctctcccggccgctcacccccgtcttcttgactacctccggcccggcctcggccctcagcagcgtctcttcgcggcgcaactctctctgtttatcggaggatctcccgagctgcccgccgagcatgagagacggcgacgtcgcggtcgaagacgacgacgacgacaacgacgacgacaacaacaacaacaacaacaacaacaacaacaacaacaacaacaacaacaacaacaacggaaacggcgatcaggagggcatgaatgcagagaaacagcagcagcaacaacatggcggcggtagcgctgacgagggagacatcagcaatatccagggtaatgacgacgacgccggcggcggcggcgacacgagctgcgagatctcgccgtccatggtggacagcggcagcgccccgcagctgatcatgcccagcatcaaaatgcccagccgccggcccttcaccgacgatggcaagcgcatgggccgcctcaaggtgctgatcgccggcgacagcggcgtgggcaagacgtcgctgatcaaggcgatcgtgcagtcgtgcgaccacatcgtgcacgtcgaccccatcaacccttcgccctcgtcatcgtcggtggttatgggcaggtccggcctgacgggctctgccttgggtagtcgggtatcgcgatacataaggcctggcagcatgcggcagtctgcgagggagagtgcgcagggaacgacccagatcaccgagatctacgcgagcacgaagccgtacccggagtggtggtccgaggtggacgatctcagggtgctgcggcggaggaagagcctgggagactcggtgctggatcggaatatctgctttgtcgacacgccgggatacgggagcggctcatcttcaatggacacgataacacccgtatcgcaatatatcgaagctcatctgcagcggataagctcgaactcgctgagcgatggggacctgttgaacctactgggtggagaaggcggtgtccaggttgacgccgtgttctacttggtttcaaaccgcctccgacctgttgacattgaataccttcggcaactctctcccttcacgaacatcatcatcctgcttgcccaggcagacctgatgtctgccgatcagatcgcggccagcaaagcccagattcacggccagctcaaggaagccgacatccgcctcttctccttctccctcccgtcatccccaacagacgcggacaagcagggcgtctacgccgtctccaacgcgaccggttccgatcacgacacgatggatgccagcctgctcatgtcgccagactacgtccagcccctggccccctccgaactctgcactctcgtagccgacgtcttctcccccggcggcgtcgcccgcctccgccacgccgtggcacgcaaatatgtccagtggcgcgcctcgtcaggccaatcccgcacgtcgtcctctctgttctccaccccgtctctgtcccgccacaaccaagcctcccccctctccctctccctctccctccagcggacgtcggaggcgggaacgtccaactcgtacgcgctcgcccgcctggccgaccacgcgcagcgcgaagagcgcctcgcgcaggtgcgcctggccaactgggccgccgacctgcagaggagcctcgcgcgggagcgggaggagtacgcgagcctcgccaggaaggagcgggcgctgtggctggccgagcgcatgggcgagtgcgtgcgcgacggggacctgggcagcctggtcgtttccgaacggtcacggtctcgtttgggagtggcgaccgatgctagtaatagggacgaggaagggaggacgagggcgccgcggcggcagaggaggggcagggcagggcagggggacgcgaaggaggattattgccatcattcttctcatcgtcattgtcatcatcatcatcatcagcagcagcagcagcagcagcagaagcgacaacagcagagtcagcagcacaagcaggacccgcttggtctgctggaagtggccgacgaactgaggcacaagggcctggtcgccctcgagctgctgggtggaatcggcgtgctgggcgggctggcgctgtgggtgaccaggaactacctgcacctgcaaccgtacggctggttggccgccgagtgggagcgtttctggtacggtcagcggtaa

SEQ ID NO: 4059 - protein, 857 aa, Myceliophthora thermophilia
MRPLTGDDASARSRTSDRTSDPDPLSTFRLPAAPQMTFTLGDESTIGPSSQGPTIPSRRAKEHGAVPHTEQHPEHPEHSKPRIPSHLDFERTKEPATTTRPPGSKGGTIDTLRQEGYDLSQPVSPLPRSTDTPNLSRPLTPVFLTTSGPASALSSVSSRRNSLCLSEDLPSCPPSMRDGDVAVEDDDDDNDDDNNNNNNNNNNNNNNNNNNNGNGDQEGMNAEKQQQQQHGGGSADEGDISNIQGNDDDAGGGGDTSCEISPSMVDSGSAPQLIMPSIKMPSRRPFTDDGKRMGRLKVLIAGDSGVGKTSLIKAIVQSCDHIVHVDPINPSPSSSSVVMGRSGLTGSALGSRVSRYIRPGSMRQSARESAQGTTQITEIYASTKPYPEWWSEVDDLRVLRRRKSLGDSVLDRNICFVDTPGYGSGSSSMDTITPVSQYIEAHLQRISSNSLSDGDLLNLLGGEGGVQVDAVFYLVSNRLRPVDIEYLRQLSPFTNIIILLAQADLMSADQIAASKAQIHGQLKEADIRLFSFSLPSSPTDADKQGVYAVSNATGSDHDTMDASLLMSPDYVQPLAPSELCTLVADVFSPGGVARLRHAVARKYVQWRASSGQSRTSSSLFSTPSLSRHNQASPLSLSLSLQRTSEAGTSNSYALARLADHAQREERLAQVRLANWAADLQRSLAREREEYASLARKERALWLAERMGECVRDGDLGSLVVSERSRSRLGVATDASNRDEEGRTRAPRRQRRGRAGQGDAKEDYCHHSSHRHCHHHHHQQQQQQQQKRQQQSQQHKQDPLGLLEVADELRHKGLVALELLGGIGVLGGLALWVTRNYLHLQPYGWLAAEWERFWYGQR

SEQ ID NO: 4060 - DNA, 3051 bp, Myceliophthora thermophilia
atggcggcatcgttaaccctcacagaagcgcaggttgagctgatcaactccctgccgcaagacgatatccccgcaaaacttcgatgcgccatttgcagcaagctcgcgatcaacgctttccgcttgccgtgctgcgagcaggccatctgcgagagctgccaatctacgctacccgcgtcttgtcccgtctgcgagcattcgcccctgtcagccgacgactgcaagccccacaaggcgctacgcactacgatcaaggtgtttctgcggaccgaggagaagaagcgggagtccaataggcccaaaggtgccgctcctaccccgattaccccggttgatcccagcccggtcactgctgctgcgcctgctatcccggagcgaccgttgagcggagaagcaactcaggctggagaggatcgacaggccccagtgggcgaaccctcggctgatacggaagctcgtggcgaagttgagcacggaggagaggaaaccgtacagcagaatggacccgagcctgtcaaggaaaacgcaaacgataccgaacaaccagttcaaggtgacgcagatggcgaaggtggagggaactcttcgaccgatttaatcccagcacagcaaggttccgaagttgatgatggtggcaacactgagggaaccaaggaggaaaatgcgaatggcgacgataatggagacgagaacgaagcgggccccgggtttgctggcggcgtccaaacggagggcatgagcggcgcattttccattaccggaatggctccaggattcgaccagatgcagatgatgatggccatgcaaaatgggtttggcaactttccgatgatgggcatgccaggcatgaacatggacccgatgacgatgcagatgtacatgaatggaggttttcaaggcatgggcatgaacggcatgaacatgaatatgggcatggggggctacgggggcgaacccgataactggaacggacagcagtcatggaatgtcggccaagataattacaatcatccaagcgcttctggcatgggcaatggtgattatggctcgtttaactctggcttccagacaggattcaatcaaggtaattatggccatcagaaccaattcaatgactatcgccggaaccagttcgggttccgcggtaggggtcgaggccgtggttacggatacggatatggccgcggaggctaccagcacggatacggcggcggcggcaactggaatgagcagggctacggcggacaccagcagtaccagaacgggcagggggactaccaggccgccggtggcgaggcaaacgcggacggcaacgttgacgagtttggacgttccctccgcggtgacaatgcgcagggagccagtggcgagcaaggccagggggccggggagggcgtcccgaggatcggaaaccgggagcagggcaacgacggtggtgacggcagaggcagtctgccgcctccacagcccaacccggacgtgcccccgaacgcgcccaagggcccgaaagccatgctgcagggtctccctaacacgagctataagcatctccaggctagaggctgggtggatgataccaagccgacgacgcccaccggcgcggccgcgccggggttcgaccgcggtcggtcgcggagtaattccgtcctcggctcccaccacaacaggtaccacaacgagtcacagcatgagaggagccgggagcgcgaccacagcggtcgggatcggcaccgtgaacgtggcagggacagagacatggacaccagccggagtaggagccgaaccaggagccgaagccgaagccacagtcggagccggagccggagccggagctacgatcgcaaggagcagcggcgcagcaggcggcagcggtcgtactcgccgtcgggggatgaggaggacgaaagcggtgacgagcgccgccaccaccgttcctcgcatcgcaggaagcactcatcgtacggcaacgatgaacgcgagtccaagcctcgccgggacgagcaccaagaggagggccggtccaggtcagcgtccccccccgcggacgactcccggcggagctaccgcagcagccggaaggagcgggactcggagaagcgccgtgacagggaccgcgagaaagaccgcgagaaagaccgcgaaaaggaccgcgaaaaggaccgcgacggccaccgccaccggtcacaccggtcacatcgcgatcgggagcacgaccgggaccgggatagggatcgtgaccgagaaaaggagcgcgacagaactcgggatcgtgaccgggaccgcgaccgcgaccgagacagggatagggaccgggaccgagaccgtgatcgggatcgggatcgggatcgagatcgtgagagggaccgggatagggatcgcaaagaccgccaccgagaccgcgatcgcgacagagaccgtgaccgcgagcgggagagggacagagacagggacagagagagtcggcgcgaccgcgagaaggacaaggaccggcatcaccgcagcagcaagacgaccgcggcggacggtgaggacgaacagcccccctcggcgctcgacaacaccgaatcctctcaacacccacgccacccctcgatcggctcccgtggcgccctaggcctcgagatcaagggcgccgccagcgcgggaacatcaacggcggcggcggcggcggcggcagctggagccgtggacggcacccgccgctcctccctcgccacggccacgcccgcgacgggtgccacagacgtgcacgcggcggagcgggccgcgcgcgacagggagcggctcctacgcgagacgcgacgcatggccagcctgacgagcctggctgcggccgcgggcggggcgtccggactgaagaggtcgagggagagccgcgatggcggcggcggtggcggcggcgtcggcgacgaggaacgtaagagcagccggcggaaggggaggaggggggaggtgattgtcgggggtgatgccgtagtggcggatggtgaggccgaggaggaaaggatgagacggctggaagaggaaagagagcgggctagatatgagtga

SEQ ID NO: 4061 - protein, 1016 aa, Myceliophthora thermophilia
MAASLTLTEAQVELINSLPQDDIPAKLRCAICSKLAINAFRLPCCEQAICESCQSTLPASCPVCEHSPLSADDCKPHKALRTTIKVFLRTEEKKRESNRPKGAAPTPITPVDPSPVTAAAPAIPERPLSGEATQAGEDRQAPVGEPSADTEARGEVEHGGEETVQQNGPEPVKENANDTEQPVQGDADGEGGGNSSTDLIPAQQGSEVDDGGNTEGTKEENANGDDNGDENEAGPGFAGGVQTEGMSGAFSITGMAPGFDQMQMMMAMQNGFGNFPMMGMPGMNMDPMTMQMYMNGGFQGMGMNGMNMNMGMGGYGGEPDNWNGQQSWNVGQDNYNHPSASGMGNGDYGSFNSGFQTGFNQGNYGHQNQFNDYRRNQFGFRGRGRGRGYGYGYGRGGYQHGYGGGGNWNEQGYGGHQQYQNGQGDYQAAGGEANADGNVDEFGRSLRGDNAQGASGEQGQGAGEGVPRIGNREQGNDGGDGRGSLPPPQPNPDVPPNAPKGPKAMLQGLPNTSYKHLQARGWVDDTKPTTPTGAAAPGFDRGRSRSNSVLGSHHNRYHNESQHERSRERDHSGRDRHRERGRDRDMDTSRSRSRTRSRSRSHSRSRSRSRSYDRKEQRRSRRQRSYSPSGDEEDESGDERRHHRSSHRRKHSSYGNDERESKPRRDEHQEEGRSRSASPPADDSRRSYRSSRKERDSEKRRDRDREKDREKDREKDREKDRDGHRHRSHRSHRDREHDRDRDRDRDREKERDRTRDRDRDRDRDRDRDRDRDRDRDRDRDRDRDRERDRDRDRKDRHRDRDRDRDRDRERERDRDRDRESRRDREKDKDRHHRSSKTTAADGEDEQPPSALDNTESSQHPRHPSIGSRGALGLEIKGAASAGTSTAAAAAAAAGAVDGTRRSSLATATPATGATDVHAAERAARDRERLLRETRRMASLTSLAAAAGGASGLKRSRESRDGGGGGGGVGDEERKSSRRKGRRGEVIVGGDAVVADGEAEEERMRRLEEERERARYE

SEQ ID NO: 4062 - DNA, 702 bp, Myceliophthora thermophilia
atggcggactcgaacgctcccaaaccaagcagcagcgtcaagctagtgctcctcggtgaagctgccgtcggaaagtcttccctcgttcttcgattcgtcaataacgactttcaagagaacaaggagccgacaataggagccgcctttttaacacagaaatgcaacctaccgacgcgaaccatcaagtttgagatatgggatactgcaggccaggagcggtttgcatccctcgcacccatgtactaccgcaacgcgcaagccgccctggtggtctacgacctgacgaaaccgacatccttgatcaaggctaagcactgggttgctgagctacaacgccaggcctccccaggcatcgtcattgcgctggtcggcaacaagctcgatctcgcggacgacggagccgggagcggcggcgatgcggaggatgccgggggcgaggagtcgggcaatgcgaggaagatctccaccgaggaggccaagacgtatgcggaggaagaggggctgctgttcttcgagaccagcgcaaagacgggctataatgtcaccgaggtgtttacggcgattgccaacgccattccggaaacctcgttgaagacggcccgtgggccgggcgcgtcgcatgcggctgccaggacagaggaacagagggtgaacctcaacgggccacgggatcccaacgcgaaggagggctgtgcttgctga

SEQ ID NO: 4063 - protein, 233 aa, Myceliophthora thermophilia
MADSNAPKPSSSVKLVLLGEAAVGKSSLVLRFVNNDFQENKEPTIGAAFLTQKCNLPTRTIKFEIWDTAGQERFASLAPMYYRNAQAALVVYDLTKPTSLIKAKHWVAELQRQASPGIVIALVGNKLDLADDGAGSGGDAEDAGGEESGNARKISTEEAKTYAEEEGLLFFETSAKTGYNVTEVFTAIANAIPETSLKTARGPGASHAAARTEEQRVNLNGPRDPNAKEGCAC

SEQ ID NO: 4064 - DNA, 1620 bp, Myceliophthora thermophilia
atgggcgtcttcgagaagtcctccgacggaggggcggcttccaaggaggaggtcaaggaccctatccaggcgaacgcagcagccgacgatgtcgagaccggtgacatcaagcaggaggacaagtatgcctacgatgactcgcgcaagctgggcatcacgggcgccgtgttcctcatcctcaacaagatgatcggcaccggtatcttctcgacgccctcgagcatcttcgcggcgaccgggtccgtcggtgtaagcctgatgctatgggtgattggtggctttctcaccttctgcggcctgagcgtctggctcgagttcggcctggccattccccggtcgggcggtgaaaagaactacctcgaatacatctatcgccatcccaagtatctcgcaacgtgcgtcctggcttcgcagatgatcctgctcggcttctcgtctggtaactcgctcgcttttgggcgctacatcctgtacgcggcacgcggcgagctcaaggacacctaccaggcgcgcggcatcggcgtggcatgcgcgaccttcgccgtggtgctgcactcggtggcgcctaagtggggtgtccggctcttcaacctcctgggcgtcttcaaagtggccgtgctgctattcatcgtcttctcgggctttgccgcgctggccggccgccgtttggtgtccgacccgcacaactttgacaacgcgtttgccatcgagtccggcgagggatacggcggcggcggcgcgtacgcctactccaacgccctgctcaacattgtctacagcttcaagggctgggagaacgcaaactacgtgctcagcgaggtcaagaacccgcgccgcacactcaccatcgccgcgccgctcgccatcggcggcgtgaccatcctgtacgtgctcgccaacgttgcttacttcgccgccatccccaagtcggacctggcgacttcggaggtcatcgtggccgggctcttcttcaagaacgttttcggcgatagcgccggcgcccgcaccctgcccgccttcgtcgcgctcagcaacctgggcaatgtcctggccgtcagcttcgcccacgcccggttgaaccaagaactcggaaaggagggtctgttgccgctaagccgcttgtggggctcaaaccggccgttcaactcgcccgcagcagctctattcctccactggctcgtcaccgtgatcgtccttctggccccgccccccggaccggcctacaacttcatcgtcaacctgtacacctatcctggcgcttggatcaacgccttcgtcgccgcggggctcatctacctccagtaccagaggaaggagccgtggaaccccgggtggcgcacgtggctgcccatcaccgtcatcttcttgctgtgcaacgcctttttagccgtcgtgcccttcatcccgccggccgatggggatttctgggccgaggggtatccgtactacgtgttccctgtcgtcggcgtcggcgttctcatcttgggcggcatctactgggtgctgtggactaagttctggccagccgttaggggccacaagatcgtggcggaccggatcttggacgaacaaggggtggaggttatcaggtatcggaaagtcaagacgcatgctgcgtag

SEQ ID NO: 4065 - protein, 539 aa, Myceliophthora thermophilia
MGVFEKSSDGGAASKEEVKDPIQANAAADDVETGDIKQEDKYAYDDSRKLGITGAVFLILNKMIGTGIFSTPSSIFAATGSVGVSLMLWVIGGFLTFCGLSVWLEFGLAIPRSGGEKNYLEYIYRHPKYLATCVLASQMILLGFSSGNSLAFGRYILYAARGELKDTYQARGIGVACATFAVVLHSVAPKWGVRLFNLLGVFKVAVLLFIVFSGFAALAGRRLVSDPHNFDNAFAIESGEGYGGGGAYAYSNALLNIVYSFKGWENANYVLSEVKNPRRTLTIAAPLAIGGVTILYVLANVAYFAAIPKSDLATSEVIVAGLFFKNVFGDSAGARTLPAFVALSNLGNVLAVSFAHARLNQELGKEGLLPLSRLWGSNRPFNSPAAALFLHWLVTVIVLLAPPPGPAYNFIVNLYTYPGAWINAFVAAGLIYLQYQRKEPWNPGWRTWLPITVIFLLCNAFLAVVPFIPPADGDFWAEGYPYYVFPVVGVGVLILGGIYWVLWTKFWPAVRGHKIVADRILDEQGVEVIRYRKVKTHAA

SEQ ID NO: 4066 - DNA, 1815 bp, Myceliophthora thermophilia
atgaggcgggcggcgggatggaacaggtcgtgcggcgcagcgcagctggaggaggtcctagagcggttattagagatcgcgcccgccagacacggcgcccagcctgtgtcgcctgccaaaccaaaaagtccggcccgcgcaggccaactaaccgtttcgtcgtctgttccgcagctccgatgcactggcagctccttcaactgcgaccggtgtcgcgccaggttgatcgagtgcgtcttccccgccggcgatggtggcggcaggcagagcaagtcgcggccgtatccgtggacatcgtcgcagcccagcaatataatcggcagcattagtagctcatcatcgtcaagcaatctcgcatggcaaaagtcgggcgaagcgtctccccagcagggcgatccctcgcgcgccgactcgtcagaatccccttcggctgatggggtagaggcgccaaacgggtccaaggggctaatagcgatcgagccgacaggttcaagctcgcacgagaagcagcagcagcagcagcagcgggagcagcgggagcagcgggagcagcgggagcagaagcaagaccaacccgcactaagaacccccgagtcggtcggcgttgatccgctcgacggccatttgttcaaccgtgagtctgtcgtggtggatttggtgatgaaccaggccttggcagcatggctgacggtttcttccgcggcagtggatgccgttgagggactagacatcaacatgggcgagcctgggctagatggtattgtgcttgatatcccatccggcatcggccctgcccatagcgggagcagtgatccacaccgggcgagcaagccaccccgaaaagacgcctccaacactctaggctcgtacctatccgctgccctggctcagagcaacaaccccctcacacagggacaggcccggaccgtccccgaaaccatccccagcaatgccaccgagaccaccaccgctcaagaactgccgaccatgcttgcgctggacgctgccccgccatcacccggccaattcggggtgctttcgggagtgtcacccgcgccggtccccattagccaaaagagctcaccgccgtgctcgtgccttagcgacctcgtccgcgtggtgcagcagctggacgacgacgagttccgcatcaccaccctttcgctggaccaggtgctgcacctgcagaaatggctggtattccagtgctgcaagccgctcgactgccccaagtgtctcgatctccccaccattcacacggtgcgcctcatcgtctgcgaccggctgaccgaaatgttcgagtgtattcattcgcgcatcaagcgtgcgggagccattttggccagccagcagggcagcgactcgggaagccattcgatttcgtcgtcgtcgttactctcctcctcctcctcttcctcctcctcctcttcctcctcctcctcagattctctccgttccgtgccccagccgccaccttggtccgcggccgtcggttccgggccgctgcccgcccagctcttctgccgctcgtcggggcgcgccgccaacactgttgcgtgcaaccccctgatgttctcggaagacttccggagccggtactcggacgaggagcaggtccacatgatccgcgcgctcctgaggctgcagaccagggatttccggaagctgcttctgcgcctcgagcgcgcgtgtgaaggcgcccgcaaccaggcgcgccgttccaagatcgagtccatgatggcgcgcctctccaaggccgaggcggatatcgaggacgcgctgcgcgtcgtcttacacgtctggtcgaccgggtga

SEQ ID NO: 4067 - protein, 604 aa, Myceliophthora thermophilia
MRRAAGWNRSCGAAQLEEVLERLLEIAPARHGAQPVSPAKPKSPARAGQLTVSSSVPQLRCTGSSFNCDRCRARLIECVFPAGDGGGRQSKSRPYPWTSSQPSNIIGSISSSSSSSNLAWQKSGEASPQQGDPSRADSSESPSADGVEAPNGSKGLIAIEPTGSSSHEKQQQQQQREQREQREQREQKQDQPALRTPESVGVDPLDGHLFNRESVVVDLVMNQALAAWLTVSSAAVDAVEGLDINMGEPGLDGIVLDIPSGIGPAHSGSSDPHRASKPPRKDASNTLGSYLSAALAQSNNPLTQGQARTVPETIPSNATETTTAQELPTMLALDAAPPSPGQFGVLSGVSPAPVPISQKSSPPCSCLSDLVRVVQQLDDDEFRITTLSLDQVLHLQKWLVFQCCKPLDCPKCLDLPTIHTVRLIVCDRLTEMFECIHSRIKRAGAILASQQGSDSGSHSISSSSLLSSSSSSSSSSSSSSSDSLRSVPQPPPWSAAVGSGPLPAQLFCRSSGRAANTVACNPLMFSEDFRSRYSDEEQVHMIRALLRLQTRDFRKLLLRLERACEGARNQARRSKIESMMARLSKAEADIEDALRVVLHVWSTG

SEQ ID NO: 4068 - DNA, 213 bp, Myceliophthora thermophilia
atggggatgaaaacgaatgttgctaggtatgcatccttcaatccgccgacccggggcatgacagtccgagaaatcgaagatgacctgacgttctactggcggttcaaaacccaccggcaactctgcaggggaattggtggaatacatgtcgagaaggcgatagagaagagattaaaccatggctttactgttgagcttgtagaaacaacatag

SEQ ID NO: 4069 - protein, 70 aa, Myceliophthora thermophilia
MGMKTNVARYASFNPPTRGMTVREIEDDLTFYWRFKTHRQLCRGIGGIHVEKAIEKRLNHGFTVELVETT

SEQ ID NO: 4070 - DNA, 3063 bp, Myceliophthora thermophilia
atggacgcccagatcgagaatgcgatcgagatcgcctgggaccccgcgtccgaccaggcccttaagggccaggccttcgagttcctgaaccagctgcgcaccgattcccaggcctggcaggtctgcaccgctctctttagccggactccccgagcatcccccgtcgtgcgcctcgtctgtctcgagatcgtcaacaacgcagtccactcccaggcactcgacggcgccagcctcggctttctcaaacagtccctactcgattacgtcgggcgcatctacggcggagatgctcaagacgaggtcgatcctccacatctgcaaaacaagctcacacaaaccctcacttacctattcgtctcgctgtacaaggagggctgggagaccttcatcagtgacttcctcgccctggctcagaaggataataatctcccgggcgtcgtcatgtacctgcgcgtcctgggttccatccacgacgagattgccgacctcatgctgagccgtccggacaacgagacaaggcgcaacaatgaactgaaggatttgatccgcgagcgagacatgcggaaggttgcccagtcctggcaagacctgctggctcgctacagcaaccagaatgacgccgtggtcgagacaacgctcaagatcatcggcaagtgggtcagctggattgacatccacctggttatcaaccaggacatgattaacctgatccttcccctggtcgggcggacacacgcggccggcaacgaggacaaggtcaggaatgccgccgtggacaccttcaccgagattgtggccaagaagatgaaggccagcgacaagatagagatgatcaacttcctcaaccttcgcgagatcgtcacgcagctgctagcaagcccaccacttcacgagtggaagggaacgccgcgatatgacaccgaccttgccgaagccgtggccaagcttgtcaacacgatcatgaccgacgtggtgcgtgttctggaagacaacaaggttgatacggacacgagggcaaaggccgagcagctcctccgggatttcttgccatcctctttgcgtctgttctcggacgagtatgacgaagtctgctcgacagtcatcccctctctcactgaccttttgaccttcctgcgtaaggttgggcagctgcccgccacgtactccgagatgctcccgtcgatcctgaacgctatcgtcctgaagatgaggtacgatgagacgtccaattggggtaacgaagacgaacagacagacgaggccgagtttcaggagctgcgcaagaagctccagatactgcagaagagcgtggcctctgtggacgagaacctctgcatagaattcctgagcaatctggtagccaacatgttttctactcttgaacaacaggggtcgcagatggactggagggatctggatctggcgctgcacgagatctatcagtttggcgagctggcgctgcccaataccgggttggctcagaagagccagccgaactcccttgctgccgaacgcctggccgtcatgatgagcaagatggtcgagtcaggcgtcgccaactacccccatcccgcgatcctgctccagtacatggagatttgcacccggtattacagcttcttcgaggaccagcaacggtatatcccccaggtgctcgagaactttgtccggctagtgcaccacgaccacgtccggatccgcacgcggtcctggtacctcttccaccgtttcgtcaagacgctcagggcgcaggtgggcaatgtggccaagacggtgatcgagtccatcagcgacctcctgccgatcaaggccgaagttcccggcaacgatgccgacgacgacatgtcctcggacgaatccgaccactcggccgacgccgtcttcaacagtcagctctacctgtacgaggccgtcgggtgcatctcatcgacgtcggccacgcctccctccgatcaggcgctgtacgctcgctccgtcatggagccgctcttttcgaacatgagcctgcacatggagcgcgcaaagaacggagacgcgcaggccatcctacaagtgcaccacatcatcatggcgctgggcaccctcgccaacggtttcgccgaggcaagtaccactcagccggccaagcggccacagccccccgaggccgtctcgaacgagttcgcgagggcggccgaggcgatcctcatcgcgctcaaccagctcaacgccagcgacgacatccgcaccgcatgccggtccgccttctcgcggctgctcggcgtgctaggcgctgctgtcctgccgcagctgccgcagtggatcgaagggctgctgtcccgcagctcgagcaaggacgagatggccatgttcctccgcctcctggagcaggtcgtctacaacttcaagacggagatctataacatcctcgacgtcctcttgacgccgctactccagcgcgtctttagcgggctgtcggagcccatcagcggaacggacgacgagatccagctgcaggagctccgccgcgagtacgtctcgttcgtgcaggtcatcctcgccaacgacctgggcggggtcctcgtcagcgccgccaaccagggcacattcgagtcgctcgtctcgtccatcatcaacatcgcgaagacgcttacccacggcaactttgtgcccagccgcatcgccttcaacgtcctcggccgcatggcgtcgcagtggggcggtccggacgtcgccaccattggtgataacccatccaccacgggcgccgccgcatctccctcgatcccggggttcgaccagttcatgctcgagcacttccacggtttgtgctggaccgtcctgcaggactccgcgttccgccccaacacggacgcccagtcgcgccagatcctgagcgagattgtcggcatccagcagattctctacgtcaagacgggcgaggctttcgtgaaccatatacagggcgtcaccttcccgcagctggggatcgacgggaccgagtatctgagggtgctgaccacgtccagggagaaaaagccggtcgtcaattggctgttgaacttgttgaaggggaggcgatag

SEQ ID NO: 4071 - protein, 1020 aa, Myceliophthora thermophilia
MDAQIENAIEIAWDPASDQALKGQAFEFLNQLRTDSQAWQVCTALFSRTPRASPVVRLVCLEIVNNAVHSQALDGASLGFLKQSLLDYVGRIYGGDAQDEVDPPHLQNKLTQTLTYLFVSLYKEGWETFISDFLALAQKDNNLPGVVMYLRVLGSIHDEIADLMLSRPDNETRRNNELKDLIRERDMRKVAQSWQDLLARYSNQNDAVVETTLKIIGKWVSWIDIHLVINQDMINLILPLVGRTHAAGNEDKVRNAAVDTFTEIVAKKMKASDKIEMINFLNLREIVTQLLASPPLHEWKGTPRYDTDLAEAVAKLVNTIMTDVVRVLEDNKVDTDTRAKAEQLLRDFLPSSLRLFSDEYDEVCSTVIPSLTDLLTFLRKVGQLPATYSEMLPSILNAIVLKMRYDETSNWGNEDEQTDEAEFQELRKKLQILQKSVASVDENLCIEFLSNLVANMFSTLEQQGSQMDWRDLDLALHEIYQFGELALPNTGLAQKSQPNSLAAERLAVMMSKMVESGVANYPHPAILLQYMEICTRYYSFFEDQQRYIPQVLENFVRLVHHDHVRIRTRSWYLFHRFVKTLRAQVGNVAKTVIESISDLLPIKAEVPGNDADDDMSSDESDHSADAVFNSQLYLYEAVGCISSTSATPPSDQALYARSVMEPLFSNMSLHMERAKNGDAQAILQVHHIIMALGTLANGFAEASTTQPAKRPQPPEAVSNEFARAAEAILIALNQLNASDDIRTACRSAFSRLLGVLGAAVLPQLPQWIEGLLSRSSSKDEMAMFLRLLEQVVYNFKTEIYNILDVLLTPLLQRVFSGLSEPISGTDDEIQLQELRREYVSFVQVILANDLGGVLVSAANQGTFESLVSSIINIAKTLTHGNFVPSRIAFNVLGRMASQWGGPDVATIGDNPSTTGAAASPSIPGFDQFMLEHFHGLCWTVLQDSAFRPNTDAQSRQILSEIVGIQQILYVKTGEAFVNHIQGVTFPQLGIDGTEYLRVLTTSREKKPVVNWLLNLLKGRR

SEQ ID NO: 4072 - DNA, 2619 bp, Myceliophthora thermophilia
atggtcaagactggccaggcgggcttggcggccgagcagctgcgtggacaagacaagacgggtttcgtctcgggaatccgggcccgtgcgtcacaaaccaacccttcgaaccgtgagcttacgcccggattatcgcagaacccatccaagccccacgcccgaccgaaccgaaactggccaacgcccgatcgcctcgcgcccgatgccgatgacctgtcactgcgggttgcgacaccggtgtgcctcatcttcttcgggggcgacaaacacaccgcggtgaaaacacatcgctggcaggcacacgaccgcaacgagaggggaggagccatgcgttcttggctaccgccgcccggcctggcgcaccgctcattgccatcgccattcccgtcctcattgaccgcattatcctctgacgacgatgacagtcccgaaggcgagctccagaattggtccagcctgattggcatcgtcaccgccatctgcggcaacgtgctgatcgccctggccctcaacgtccaacggtacgcccacatccggctgcaccgtaagagagcccgaatacgagagcgcgcgaggcaggccacacgccatgcaggtgccgggtcacagggccggggttcgggacagtacggggccgccatctcgtcaagtcgcgcttccaatggcaccttcaatggcgcgctcgaccggtacgtcggcgcccggtacaacgccgaggaagacgcccgcgactcgtccgagaccgaacccctcgcacagtccttccactcggatggctcggacggcggcgacggcgacggcgacaacggcgactacagcaactttgatacgccatccaagatctccacctcttacctaaaagacccctactggtggctggggcaggtcttgatcacgatcggcgagatgggcaacttcttggcctacggcttcgccccggcctccatcgttagcctactcggggtggtggccctggtgtcgaactgcgtgatcgcgcccatcttcttcaaggaggtcttccggcagcgggacttttggggcgtcatcattgccaccacgggcgccgtcacggtcgtgctgagcgcagagaccgaggagacaaaactggggccgcacgaggtgtgggatgctatcacgaccatggagtttgagatctacatggccgtcagctgtgccctcatcgtgttgctcatgtgcctgagcccccggtacggccacaagaccatcctgattgatctcggcctcgtggggctgtttggcggctacacggccttatccaccaagggcatctcctcgatgctgtcttcgaccctgtttggcgccttcgccacgccggtcacctacgtcctcgtgtttgtcctcctgtttattgccatcatgcaggtccgctacgtcaacaaggcgctccagcgcttcgactccacccaggtcatcccagtccagttcgtcctattcaccctgagcgtcatcattggcagcgccgtcctctatcgcgactttgagcgcaccaccgcccaacaggccgtcaagttcatcggcggctgcctcttcaccttctttggtgtcttcctcatcaccagcggccggccgcggcaggacgacgacgaggagcccgccctctccgatgcagagggtattgaggaaaccattgggcttgcggaacaggaccgcgcatcgcccccgaccccgccccaaccccgccgccgccgtgcggcctcgcgggcagacggttcttctcgggcctcgcgggtcagcttctcggacgttgacgagcacatctccgaccaacgcaccccccgctcaaccccgagcctccggaaacactttgtcgacagccgccaataccaaccccacttcgaggacgaagatgatgacgagcaagccctcttgctgtctaacccctggcaagagccaggcacaccaccacccacccgcccttccccgggtatccacaccacctcctcagactccttcatttccgccattcacacacccaccacaacggcgacagcaccgaaccaacccgctctactcgacgctcccacagaccagccaacaccgaaggccaagacagtatcagccagtagtaccagcagagataaagaccgagacagagacagggacaacaggcccgtgaccccgcgcacgcccgccaattcctcccgcccgccaccgtcccaccaagtctactccccgtcgccgttctcgagcaccgtcagcgccgtcgtgggcgacgcgctgttgcttttgcgcggatcgcaggggcagggacatggacatggacaggggcaggggcagggccaagggcagcaggcgaatgagcaggggcccgactctgggcaggacggccaagacggccgtggaaacgaggacagtgtggacacgactggggacggcaagaataacaagggcgggctgagaggccgggcgaggagcctgagccatacccttcgcttggccggtttgtttggcggcggcggcggcggtggtggtggtgagagcggggaagggagcggtgggagtttgcggaggtcgacgttgccgaggagagacaccgctagtagcacgcccgtcgggagggccgggagcgtgtttggcgggccgttacacagggcttag

SEQ ID NO: 4073 - protein, 872 aa, Myceliophthora thermophilia
MVKTGQAGLAAEQLRGQDKTGFVSGIRARASQTNPSNRELTPGLSQNPSKPHARPNRNWPTPDRLAPDADDLSLRVATPVCLIFFGGDKHTAVKTHRWQAHDRNERGGAMRSWLPPPGLAHRSLPSPFPSSLTALSSDDDDSPEGELQNWSSLIGIVTAICGNVLIALALNVQRYAHIRLHRKRARIRERARQATRHAGAGSQGRGSGQYGAAISSSRASNGTFNGALDRYVGARYNAEEDARDSSETEPLAQSFHSDGSDGGDGDGDNGDYSNFDTPSKISTSYLKDPYWWLGQVLITIGEMGNFLAYGFAPASIVSLLGVVALVSNCVIAPIFFKEVFRQRDFWGVIIATTGAVTVVLSAETEETKLGPHEVWDAITTMEFEIYMAVSCALIVLLMCLSPRYGHKTILIDLGLVGLFGGYTALSTKGISSMLSSTLFGAFATPVTYVLVFVLLFIAIMQVRYVNKALQRFDSTQVIPVQFVLFTLSVIIGSAVLYRDFERTTAQQAVKFIGGCLFTFFGVFLITSGRPRQDDDEEPALSDAEGIEETIGLAEQDRASPPTPPQPRRRRAASRADGSSRASRVSFSDVDEHISDQRTPRSTPSLRKHFVDSRQYQPHFEDEDDDEQALLLSNPWQEPGTPPPTRPSPGIHTTSSDSFISAIHTPTTTATAPNQPALLDAPTDQPTPKAKTVSASSTSRDKDRDRDRDNRPVTPRTPANSSRPPPSHQVYSPSPFSSTVSAVVGDALLLLRGSQGQGHGHGQGQGQGQGQQANEQGPDSGQDGQDGRGNEDSVDTTGDGKNNKGGLRGRARSLSHTLRLAGLFGGGGGGGGGESGEGSGGSLRRSTLPRRDTASSTPVGRAGSVFGGPLHRA

SEQ ID NO: 4074 - DNA, 1740 bp, Myceliophthora thermophilia
atggacgacaaagcggccgaggttcaggccctcgttagaaccatccaggtgcccgcaatctcaaaggccaccctgcagtccatctgcgccgtgaatggcattcccaagacgggaaacaagagcgaactccaaagacgcataatcgagcaaataaattcctgcagtgacaggcgagactgggcgcgactgcacgagattcgcgagagcattgtgaatcgggcgccgatatttgtgactccggcccttgtctctcagactcagaatcaaccgcagtcgcattcgcgacctcattcacaatctccactgtcgcacttacagctccggtcacagccaccatcgcactcgtcgtactaccaggccgcgccgccaccaacggctaccgcctctgccatgggctcatacagtcaacccggttacggcgcattcgatgggttgcttgcccaacatcctcctccacctccgtaccaacaacccccaaacggatcaacaggcggccgcatgcgcccgaacgccgggctggtcccgccgaccatcgcctacaagccgagcccattttacgaactcaagtaccaagtgggcgatgttagaacgcttgagagtgcgtccggggtctccaacccctccctcccccacccatccctcctctccgccaatccgctggctaaccggagaccagtaatgacggcgcatcgcaactcggagcgcatctccgtcaaggtacaggaccaccccgcgctccagttgtgcctgacggacccgtccatgcgcgtcatggtcatgtgcacggcgggcaacgtcggcccccaggacattgcgttcccgtaccagtgcgagctcaaggtgaatggcggcgacatcaaggcgaacctgcggggcctgaagaacaaacctgggtctactagaccggttgacatcacggacgcgctgcgctttaggccggcaagctatcccaacaatgttgagctcacctatgcactgactcagaaggtaggtgcaacgtctcgtagagatatcggttcagagaaattctacctggccttggtcgtctgcaaggccatctccatcgagacgctcgtctcgcaaatccaaaagaagattcgcaaggagtcggtcattgccgagatcaccaagagcgccggcgacccggacgtgatcgcaacatcgcagaacttgagcctcaagtgtccgctgtcatacatgaggctcaaactgccgtgccgcggaatcagctgtaatcacatccagtgtttcgacgcgacgtcatacctgcagctgcaggagcaaggcccacaatggctgtgtcccatttgcaacaagcctgcgccgtttgagcagctggccatcgacgaatacgcgcgacagattctgacccaaactcccgagtctgttgagcaggtcacgatcgagccgaacggcgaatgggcggtgccaggagctaagaaggaggtaacgccggaccacgaaactagctaccttgacgacgacgacgtcgtggtctccgaggaggtcaccaagactgcaaggagggcttcgaccggcccttcacaggctgcggcacctacgccgcacctagcaacaccaaccagcgtagcgtccagagacgcgtccgcggccccgagatcgtccaacaagcggccggctcccgaggtgatcgacctgaccttgtcggatgacgacgagccgccgcgacctgtgaagcgtccaaatcaaggctttgggttgccgtccgggggtagttag

SEQ ID NO: 4075 - protein, 579 aa, Myceliophthora thermophilia
MDDKAAEVQALVRTIQVPAISKATLQSICAVNGIPKTGNKSELQRRIIEQINSCSDRRDWARLHEIRESIVNRAPIFVTPALVSQTQNQPQSHSRPHSQSPLSHLQLRSQPPSHSSYYQAAPPPTATASAMGSYSQPGYGAFDGLLAQHPPPPPYQQPPNGSTGGRMRPNAGLVPPTIAYKPSPFYELKYQVGDVRTLESASGVSNPSLPHPSLLSANPLANRRPVMTAHRNSERISVKVQDHPALQLCLTDPSMRVMVMCTAGNVGPQDIAFPYQCELKVNGGDIKANLRGLKNKPGSTRPVDITDALRFRPASYPNNVELTYALTQKVGATSRRDIGSEKFYLALVVCKAISIETLVSQIQKKIRKESVIAEITKSAGDPDVIATSQNLSLKCPLSYMRLKLPCRGISCNHIQCFDATSYLQLQEQGPQWLCPICNKPAPFEQLAIDEYARQILTQTPESVEQVTIEPNGEWAVPGAKKEVTPDHETSYLDDDDVVVSEEVTKTARRASTGPSQAAAPTPHLATPTSVASRDASAAPRSSNKRPAPEVIDLTLSDDDEPPRPVKRPNQGFGLPSGGS

SEQ ID NO: 4076 - DNA, 2076 bp, Myceliophthora thermophilia
atgaagtttttctccaaaatatcgtccaagaaaccaaactcggccgacgaggaggaggacgagcactccggattgtacgattcttcacaaccatcctcgcccaccaagtcgcccaccaaatctcccgcaaaatcatcgggttcacgatcgcccaccaaaaaggcctcctcgcagcgctccgcctcgccgccctcacgcgagcctaagccgcagtcgccgcgcacctcgcgcccttttgcgcgacacctttctgacgcagggcgacgtaaaaagatcgatccggacacgcacccgctcaacctgcctcccgaacagcgcaagcgactgtcggaactgtctgccatgagcgctcgcaattcaatggacgtcgaaaaggagacggtcaacggaggtaacccctcctcgcctccctcgcaaccgccgccctatcagcagccgccgccgcggccggcgaacccgccgtctcaccagaattctttcaccgtgcccgtggcaaacgggaccgacgcatccattaacggcgctgctgacgaagcagtgccccctcctccgccccatcgatcacagccttccagcccggtgcagtccgaggccgagcaggccgagtcgttcaagaatgagggcaataagttcttcaaggcgggtgattacacccatgccatcgagttctacacaaaggccgtcgtccttcagcccaactctgccacctacctaggcaaccgggccgcggcttacatgtcggccggcaagtataacgaagccttggcggactgcaagcgagctgccgatctggaccctcacaactccaagattctcctccgcctcgcccgcatctacaccagcctgggccagcccgaggaggccgtcgccacgtttgggcgtatacgcccggcgccgtcggccaaggacatggcacccgccaaggagatgcttcgtcacgttcgggcggcgcagcaggccctcgaggatggcacggcagcttccatggttctccacccgctcgacatggcggagaagctgcttgggcccggcgtgctaaggccgagaaagtggcagcttatgcgcggcgaagcgctcctaaagatgggtgatgccaactcactcggagaggcacaaaacattgccatgtcgctcctgcgtcagaacaaccaggacccggagggtctggtcctgcggggccgggcgctctattcgcagggcgataacgacaaggcggtgcagcatttccggaaggcactcagctgcgatcccgacttcaaagacgccgtcaagtggctccggaccgtccagaagctggagaggatgaaggaggatggcaacacgcaatacaaggccgggcggtggcaagcagccctcgacctgtacacatcggccctcgaggtcgacccgacgaacaagggaacaaactccaagatccttcagaacagagctctgtgccgtatcaagctcaagcagtacgaggatgccatcgctgactgcgagagggccatcagtctcgacccgcagtacatcaaggcccgcaagaccaaggccaacgccctgggcttggccgagaagtgggaagcggccgttcgggaatggaaggcgatccaggagctggaccccgaagaccggaccattgccaaggaggtccggaaggccgagctggagctgaagaagtcccagaggaaggactactacaagatcctcggtatcgataagaacgcgaccgacaacgagatcaagaaggcctaccgcaagctggccattgtccaccatccggacaagaaccccggcgacgccgatgccgatgcccggttcaaggacatcagtgaagcctacgagacattgatagaccctcagaagcgcgagcgctacgatagcggcgtggacctggccgatccctctgatatgttcggaggaggcggcatgggcggcggcatcgacccagagatcatcttctccatgatgggaggcatgggaggaggcggcccgttcggcggcggcggagggttccccggcggcgccagcttctcttttgatggccgcggcggcggcagaggcggcttccccccgcatggcttccagttccgttga

SEQ ID NO: 4077 - protein, 691 aa, Myceliophthora thermophilia
MKFFSKISSKKPNSADEEEDEHSGLYDSSQPSSPTKSPTKSPAKSSGSRSPTKKASSQRSASPPSREPKPQSPRTSRPFARHLSDAGRRKKIDPDTHPLNLPPEQRKRLSELSAMSARNSMDVEKETVNGGNPSSPPSQPPPYQQPPPRPANPPSHQNSFTVPVANGTDASINGAADEAVPPPPPHRSQPSSPVQSEAEQAESFKNEGNKFFKAGDYTHAIEFYTKAVVLQPNSATYLGNRAAAYMSAGKYNEALADCKRAADLDPHNSKILLRLARIYTSLGQPEEAVATFGRIRPAPSAKDMAPAKEMLRHVRAAQQALEDGTAASMVLHPLDMAEKLLGPGVLRPRKWQLMRGEALLKMGDANSLGEAQNIAMSLLRQNNQDPEGLVLRGRALYSQGDNDKAVQHFRKALSCDPDFKDAVKWLRTVQKLERMKEDGNTQYKAGRWQAALDLYTSALEVDPTNKGTNSKILQNRALCRIKLKQYEDAIADCERAISLDPQYIKARKTKANALGLAEKWEAAVREWKAIQELDPEDRTIAKEVRKAELELKKSQRKDYYKILGIDKNATDNEIKKAYRKLAIVHHPDKNPGDADADARFKDISEAYETLIDPQKRERYDSGVDLADPSDMFGGGGMGGGIDPEIIFSMMGGMGGGGPFGGGGGFPGGASFSFDGRGGGRGGFPPHGFQFR

SEQ ID NO: 4078 - DNA, 2784 bp, Myceliophthora thermophilia
atggccgaaaacaagatgcaactcgaagattggttggacgacctttgcgtccgttttatcatccacctcccaaaggaggatctgtcatcggtcgcgcgtatatgtttccaagttgaagaggcgcaatggttctacgaagatttcatccgtccgttggacccgactctgccatccatgtccctccgaagtttctgcctaaggatattccagcattgtcctctgctggcgcctttctcggctgagaaccacatgcgcgcgttcgaagagtttatgcaatacaagacgagagtcccggttcggggtgccatcctgctcaatgaggccatggactccacggtgcttgtcaagggctggaagaagggcgcaaactggagcttccccagaggcaagatcaacaaagacgaagacgaccttgactgtgccatccgcgaagtatacgaggagactggcttcgaccttaggcaagcaggactcgtgcctaaggatgacgaagtgaagtacatccagatctccatgcgggagcagcagatccgtttatacatcttccgcaacgttcccatggacaccgtcttcgagcccaagacgcggaaagagatcagcaaggttgagtggtacaagctttcggagctgcccgcgtttcggaagaagggtaacagttcccatgacaatgctgccgccgcgtccaacgccaacaaattctatatggttgccccgtttcttgtccccttaaagaagtgggtgcttcaacaaaagaaaaaggacgccagccgagcggccgccagcagttctcaccaggccattcaccctcccgccgaagagcctctcaccgaggacgatatcggcactcatgtcgagcctgtccctgggccgtcgaatggcaccccagcaatcgagacaatggagggtgcgacgcgcgaactccagcgccttctcaaagtccaaccgccaactcagggcctgcagatgagcccctcttcttcgaccgccagcaagggagaagcgttgatggcacttttaagaaagagcgcagagcctcagcaagctccacagcaacctcaccatcctcattctcaaacttcgaatactgcaccggatctcgctcacacgagtggtcccggagcacacgccccgcaccaccacggttcgacctacggccaaccggctcctaaccatcaaccgccatcaaatttccctgtcacgccaagttcaatgcagaatacggctcctgcatatgccggtcaagacagtgcccatgcccacgacatgtcacaaacatacggccgcaacccattcattagctctacacaaccgcaacgcagcgagccggttcttctacacccacagccactgcccccgcaggtccagcagtctgtgcttaccaggggtatcctaccgaccccggtgctcctggatgcggttggtcagggggggcagcatggccagcagaatgggcaacaaagttatcagagaggtccgcatgctccggcgggcggtcagtataatcaacctggagctccaagtccgtatactgttggcgcaaacgattcgtatgcgactcagcagcaaacaccaaaaccagcccagttaacggatcacgctatggcattgttgaataccttcaagcatggtacgcgggatggcggtgaacacaaagcccacggaagtgctccccaaaaccccgcctcagtgtcggttcagcagaaccagtatcactcggcatcttgggcgaacgccgcctctacaacgcaggcatcaaatcctgcagcacagtttctgcctcatcccatgcctcccgtgacggctgcagggacgtcgccacgtgcgatacagccgtctgacccgcaggctggatccagatttccccagccgaatgacacccatcgctctgcattattggaaatgttcaaaaaagcaggccccaggtcaccgttgagtaacgagatcaaaatgcagcctggcagttcacagcagagtcccggaaccaccaggcataatgatacagggagcccggcctacaaagcgacgtctgccgccgaattgcttgcctcggcttcgggagccaaccacacgcctggaagaaccgattccgaattgaaccggccttatcggcctgtccaaattctgagtcggccaaagcagggagagcacagtagctcccaggacttcgcaagcgcacaagcccagatacagcgactgcagcagcgcctcagcccgatgggctctacatggcaagatgccgggaacactggccgccaaggcatgtcctctccgcgtgaccgagccttttcacattacatggaacaggaagccaagcgatctccacagccgaattacgcagccgctcacgcggccagcctcccctacgcatcgcagtcaccgtctagtacccattttgcttccccattccaacaacagcaacagttccaacagtcgataggcatgcagcagcgccgcaaagactccaatcctgagcaaaaacaaaagcttctctcgctttttagcaaagggcagcagcagcagcagcagtcacaacaggcttcaccaacagggtttacggtagaggcgaagggcaaaggcaaggagaccacggtttttgaacagccccgttcgggtagcacccctcgctcgcgcgtggcctcgtttgcgtcggctggagcaaatgagccttccggcactggtggcaacggacaaacatcgcggcgtggcagccaaacacccatttcgccggcggaccggaacttcctcctgtcgtacctggaatcagtgacgaacgcggggcgttaa

SEQ ID NO: 4079 - protein, 927 aa, Myceliophthora thermophilia
MAENKMQLEDWLDDLCVRFIIHLPKEDLSSVARICFQVEEAQWFYEDFIRPLDPTLPSMSLRSFCLRIFQHCPLLAPFSAENHMRAFEEFMQYKTRVPVRGAILLNEAMDSTVLVKGWKKGANWSFPRGKINKDEDDLDCAIREVYEETGFDLRQAGLVPKDDEVKYIQISMREQQIRLYIFRNVPMDTVFEPKTRKEISKVEWYKLSELPAFRKKGNSSHDNAAAASNANKFYMVAPFLVPLKKWVLQQKKKDASRAAASSSHQAIHPPAEEPLTEDDIGTHVEPVPGPSNGTPAIETMEGATRELQRLLKVQPPTQGLQMSPSSSTASKGEALMALLRKSAEPQQAPQQPHHPHSQTSNTAPDLAHTSGPGAHAPHHHGSTYGQPAPNHQPPSNFPVTPSSMQNTAPAYAGQDSAHAHDMSQTYGRNPFISSTQPQRSEPVLLHPQPLPPQVQQSVLTRGILPTPVLLDAVGQGGQHGQQNGQQSYQRGPHAPAGGQYNQPGAPSPYTVGANDSYATQQQTPKPAQLTDHAMALLNTFKHGTRDGGEHKAHGSAPQNPASVSVQQNQYHSASWANAASTTQASNPAAQFLPHPMPPVTAAGTSPRAIQPSDPQAGSRFPQPNDTHRSALLEMFKKAGPRSPLSNEIKMQPGSSQQSPGTTRHNDTGSPAYKATSAAELLASASGANHTPGRTDSELNRPYRPVQILSRPKQGEHSSSQDFASAQAQIQRLQQRLSPMGSTWQDAGNTGRQGMSSPRDRAFSHYMEQEAKRSPQPNYAAAHAASLPYASQSPSSTHFASPFQQQQQFQQSIGMQQRRKDSNPEQKQKLLSLFSKGQQQQQQSQQASPTGFTVEAKGKGKETTVFEQPRSGSTPRSRVASFASAGANEPSGTGGNGQTSRRGSQTPISPADRNFLLSYLESVTNAGR

SEQ ID NO: 4080 - DNA, 4425 bp, Myceliophthora thermophilia
atgcctcccgccaagcgagtgaagagcagcgcggactcccggccgaatgccgagtcgtcaaagcggccgaccgtcgaggatctggagggggagagcgagttcgcgagtctcgcgcggcagcattggctcaaggcgacgccgaaacacgcatccaaggcgcaggccaaggtcaaggtaaagaacgacgtgctcaagagggagatatgggacgttttggaaaaggataattttcctataaagtctctgctggtgcttgaaggattgcagacgttggagagctacctgtggcccggatatggagaggactcgtccaactaccatgtcctcctcatcatcttgatagtcaatgccaagcggagggagaggttagaaacctgggacatcttcgccgaccgccccgctgatttctcagacctctttcgccgtgccctctccctgactctcgatgactctctgacgtggaccattcgaactcatgttctgttgtttatcatccacgctttccagagtctggactgcgccatcgttcgcaaggagtgcgcccctctggtttcgatctcaatctggcataacctatcgacggaggagaagcgcgtcgcaatcctcgaagcgaacccgcaattgaagaaagcttggagggcatccaccaagcggtacgactcggccgacgacgccaccaagtcccgcttgcgcttcgagaggtcttggctgtacaccttggttcttgacttcctggccttgctctataccgcgaacccgaaaccagagcacttgctgtactgcgagcgcttcgtcgaactcttgacggatctgctcagccagctcccaacccggcgatacgtcaacacccttctccaggacatgcacgtcctccccgccctgaccctgtcgcctatctacaacgacgagggaagcggcttgctgcgagagatgtgtgccctattctctcactacacacatttctgcgtcgatgactactccggggcccaactcagccttattgaggcgtatgatcggcattgcggtgccctggctaggctgcaaaggaccgcactgaagcatttcaaggagaagctgacgctgctggcactgtccaactttggttcgatcgacaagagatccgggctcgaaagcctccttcagccgttgacggacgaggagctcgcccagcttacgcaacacctgggactccgcaccacatacccggactccgctaagatcccggtggaccgcaagttcttgatggaggtccttctgtccacctttgagcgccgaaagactttccaggaggcggcccgtgacttgagtgtcctgccgaccgaagaagagcttttcgacgccagcctcaggcggaccgatcactacgacggagctcgacctgtggctcttccaaagctcaacctacagtatctgtcagtcggcgacttcctttggcgcgccctgattttgtatcggtgcgagtccttctatgccatccgccaagatatcgaggatgtgttggcgcggctgaagccggagagcaaacgcggcggggtaacaaccttctcgggcttctcaaggatggctctacccattgccaaaccgaccatcctcgaggttgtaccgccccgcgttggtcaagacaagccctccctcgtccgagccgaagtgactatcgatttgaagaggctgtcaccacaggtgcgtcgagagtgggaatccctgcgctccgacgacgtgctctttctcgtcgcggtggacgcgtcgaggtcaaggcagagcgcaaacggccgtgagccgcaatcagaggccgagaaacttggcctggtagccgtccgcgctgcagaggtcttgcaggtgcttgacgacaagggacgagcgatcagagatgttaatgcttatttcgacggccatggccgcagcgattctcggaggatacacctaggactcgatgcggcggcttacaaggcagacaccgagggcaagcggaacgtctatgacggaatcaacctcctcgtgcgacgcagtggccgagagaacaacttcaagccagtactagagtcgatccgggatctcacgctctccgatgtcccacttgctccttggctgcacgaagtcttcctaggctatggagacccagccggtgccacctacaagcatctgcccaaccgcgtcagaacggttgacttccgagatacctttctgaactggcagcatcttgttgagagccttcccggaaagattgttgaacccagcgacgacgtctctggaagcttcggcccaccatacgtgttggagaccatcgagaagcagcccgaggacgctgtttctaagccttcaaagaagagaaggcgagatgcagagcccgccttgattgctgaaatcgaaacagtccatgtttcaacttacaagccgccaaacaacgggccttacccagtcgacgcgccaaagctgaacaaggttcggttcacgccgacacagatcgaagcgatcatctcagggacacagcctgggttgactgtcatcgttggcccacccggcacgggcaagacagacgttgccacccagatcatcaacaacatataccacaacttcccggagcagaagacactcctcattgcgcacagcaaccaggctctcaatcaattattcgccaagatcgtggctctcgacatcgacgagcgccatctccttcgactcggtcatggagaagaggagctggaaaccgaagcgagcttcagcaagcatgggagggtggagtcgttcctcgagaatcggcagcgctttctcctggaagtcagtcgtctagccgcaagtatgggcgcacccggcgctcacggcaattccgccgagacagccggatacttcaactcggtctatgttgagccggcctgggccaaattcaacgacaccgtcaagtcggaggaggtgggcccccaagagattgttcaggcgtttcccttccacgcctatttcgcggatgccccgcagcccctgttcccgccagaggcggaccgcgaaacggttcttgagatcgccaatggatgttatcgtcatatttccaagatcttctcggaactggcagatgtgttgccctttgaaattctgcgacgcgacaaggacaaggccaactacctcctgaccagtgaagcccggatcatcgccatgacctcaacgcacgccgcaatgaggaggggggagatcgcctcactcgggttccactacgacaacgttgtcatggaagaggctgcccagatcaccgagattgagaactttatcccattcgccatgcagaaaccaaaagacggacgaccgggtctccagagggtggtcctgtgcggtgaccactaccagaactcgcccatcatacaggggctggcattccggcactacgcaaacctggagcagtcactcttttctcgccttgtccgtctcggggtccctaccatcaacctcgaccagcaaggccgcgctcgcccatccatctccaacttgtacaggtggcggtaccctcacctgacggatctgccgcataccaagacggaggaggaatttctcaccgccaatgccgggttcaagttcgagtaccagtttatcaacgttcccgactacaagggtaaaggagagacggagccgtcgccgcattttatccagaacctgggcgaagcggaatacgccgtcgccatctaccagtacatgcgcctgctgggctacccggcatccaagatcagtatcttggccacttatgccgggcagaaggcgctcatcaaggatgtcctagctcaccgatgcgccaagaatccgatctttggactgcctcgcgtcgtcactaccgtcgacaagtaccagggcgagcaaaatgactacatcatcctctctctcacgcgcaccacccgcgtcggctacctccgtgacatccgtcgcttgaccgtcgcgctctcgcgcgctcgcctgggcttgtacatcctcggccggcgcgaggtgttcgagtcgtgctacgagcttcgccaggccttcgagctactgctgcagcggccggacaagctgacactcgtcacaggcgagatgtggccgtcgaagaggagggtatcggtggaggctaaccacgaggagcggaaggaagggggggaggagccagatggggaaccggaaggagaggagacgggcccgggtcaagaggtggtgcaactgcacggggaggcggtcatggagggggtggagcatctcgggcagtatgtctttgagatgaccaagacaagggtgcagcagctgcgggaggagagggggttggcgggggaggtacctgttgagacggcggtggaagaggctgaggagaagtatggcgattctggagtgggcgatggtgtcgaagaggaggaggaggggcgcgaggaaggagaggagcgcgcggttcggggggatgggtttgaggtcgaagaggattaa

SEQ ID NO: 4081 - protein, 1474 aa, Myceliophthora thermophilia
MPPAKRVKSSADSRPNAESSKRPTVEDLEGESEFASLARQHWLKATPKHASKAQAKVKVKNDVLKREIWDVLEKDNFPIKSLLVLEGLQTLESYLWPGYGEDSSNYHVLLIILIVNAKRRERLETWDIFADRPADFSDLFRRALSLTLDDSLTWTIRTHVLLFIIHAFQSLDCAIVRKECAPLVSISIWHNLSTEEKRVAILEANPQLKKAWRASTKRYDSADDATKSRLRFERSWLYTLVLDFLALLYTANPKPEHLLYCERFVELLTDLLSQLPTRRYVNTLLQDMHVLPALTLSPIYNDEGSGLLREMCALFSHYTHFCVDDYSGAQLSLIEAYDRHCGALARLQRTALKHFKEKLTLLALSNFGSIDKRSGLESLLQPLTDEELAQLTQHLGLRTTYPDSAKIPVDRKFLMEVLLSTFERRKTFQEAARDLSVLPTEEELFDASLRRTDHYDGARPVALPKLNLQYLSVGDFLWRALILYRCESFYAIRQDIEDVLARLKPESKRGGVTTFSGFSRMALPIAKPTILEVVPPRVGQDKPSLVRAEVTIDLKRLSPQVRREWESLRSDDVLFLVAVDASRSRQSANGREPQSEAEKLGLVAVRAAEVLQVLDDKGRAIRDVNAYFDGHGRSDSRRIHLGLDAAAYKADTEGKRNVYDGINLLVRRSGRENNFKPVLESIRDLTLSDVPLAPWLHEVFLGYGDPAGATYKHLPNRVRTVDFRDTFLNWQHLVESLPGKIVEPSDDVSGSFGPPYVLETIEKQPEDAVSKPSKKRRRDAEPALIAEIETVHVSTYKPPNNGPYPVDAPKLNKVRFTPTQIEAIISGTQPGLTVIVGPPGTGKTDVATQIINNIYHNFPEQKTLLIAHSNQALNQLFAKIVALDIDERHLLRLGHGEEELETEASFSKHGRVESFLENRQRFLLEVSRLAASMGAPGAHGNSAETAGYFNSVYVEPAWAKFNDTVKSEEVGPQEIVQAFPFHAYFADAPQPLFPPEADRETVLEIANGCYRHISKIFSELADVLPFEILRRDKDKANYLLTSEARIIAMTSTHAAMRRGEIASLGFHYDNVVMEEAAQITEIENFIPFAMQKPKDGRPGLQRVVLCGDHYQNSPIIQGLAFRHYANLEQSLFSRLVRLGVPTINLDQQGRARPSISNLYRWRYPHLTDLPHTKTEEEFLTANAGFKFEYQFINVPDYKGKGETEPSPHFIQNLGEAEYAVAIYQYMRLLGYPASKISILATYAGQKALIKDVLAHRCAKNPIFGLPRVVTTVDKYQGEQNDYIILSLTRTTRVGYLRDIRRLTVALSRARLGLYILGRREVFESCYELRQAFELLLQRPDKLTLVTGEMWPSKRRVSVEANHEERKEGGEEPDGEPEGEETGPGQEVVQLHGEAVMEGVEHLGQYVFEMTKTRVQQLREERGLAGEVPVETAVEEAEEKYGDSGVGDGVEEEEEGREEGEERAVRGDGFEVEED

SEQ ID NO: 4082 - DNA, 3957 bp, Myceliophthora thermophilia
atggcgccgctcgtcgacaacgagcagatccagagcgccgagctgctgcggccgctacccctgtatcagcacgcctacgtctggcccttcgccatcatctggcctgtctttctgcgctactacttgacgcccgagctgtacgagaagcacattcaagcgcccgaatggactttcgtatgggttggcacaattatcacctgccagacgctggtctggctctgcactcactggagcgtcaacctcaacgccgcatttaccgccaagaaggcgcgctctgtcgatgacgcgctgctgatcaaggtcatccccgccgcgaatgccggttctgccgatatctgcaagctcgagcgcaccaaagtcggtgacaagacgaacacctcgttcctcttccagaaacgccgcttcctctacaaccctgagacgaaatcgtttggaactctggtgtacgccatcgacacagaaccgaagccgaagctcgaaacgtttcagaagtcaagaggtatcacgagtgctgtcgacctggagcgcctcgagcagcattatggcaccaacacgttcgacattcccgttccgaccttcaccgaattgttcaaggagcatgccgtagcaccattcttcgtcttccaggtcttctgtgtcggcctctggctgctggacgagtactggtactactcgctcttcaccctcttcatgctcgtcatgttcgagagcaccgtcgtgtggcagcgccagcgcaccttgaccgagttccgcagcatgagcatcaagccgtacgatatatacgtcttccgtcttggaaagtggacccagattcagagcgacaagctgctgccgggcgacctggtatccgttacccggaccaaggaggacagtggcgtggcctgtgacatgatcctcgtcgagggcaccgccatcgtgaacgaggccatgctctctggtgaaagcaccccactcttgaaggactcgatccagctccgtcctggcgacgctcccattgatcccgaaggcttggacaagaactcgctcttgtggggcggcaccaaggtcctgcaaatcacccatggcagtgctgatgaagagaggccaaagctcgcctcgggcgtccctccgcctcctgataatggtgccatggccatcgtcaccaagacaggcttcgagacctcacagggaagcctcgtgaggaccatgatctactcgaccgagcgcgtgtctgccaacaacgccgaggcgctgctcttcatcctgttcctcctcgtcttcgccctggctgcctcgtggtacgtttgggatgaaggtgtgcgcaaggatcgcaagcgctccaagctgctgctcgactgcatcctcatcgtcacgagcgttgtcccgcccgagctgcccatggagctcagcctggctgtcaacaccagcctgtcggcgcttgccaagtatgccatcttctgcactgaacccttcagactcccctttgctggtcgcatcgatgtggcctgcttcgacaagaccggcactctgacgggcgaggacctggtggtcgagggtattgccggtctcgggctcggccattccggtaccaacacgcctcgggagtctgacggtgcccacagccgcatgagccctgtccatgcaaccagcatggagaccactctggtcctcgcatccgctcatgccctggtgaagcttgacgaaggcgacatcgttggtgatccgatggagaaggccacgttgaacgcccttggttggagcctggggaagaatgacatcctgacaagcaagccgggggcccccggaaccgtgggcaccgtccaagttaagcgccgcttccaattctcgtctgctctcaagcgccagagctccgttacctccatcaacgccaccgacccgagcaccggccgcaagctgagaggtaccttcgttgccgtcaagggcgcgcccgagacgatcatgaagatgctggttaccgttcccaaggactatgaggaaacgttcaagtacttcactcgccggggttccagggtcctggcgttggcgtacaagcatctcacgaccgaaggcgagctcggcgcgagcaagatcaacgatctcaagcgcgagaatgtcgaggcagatctccactttgccggcttcctcgtccttcagtgcccgctcaaggaggatgccaagcaggccgttcaaatgctcagcgagagcagccaccgcgtcgtcatgatcaccggtgacaacccgctcaccgctgttcacgttgctagggaagtcgagattgtcgaccgcgatgttctcatcttggacgctccggagcacagcgtgcacggcgaggagtcgttgatctggcgcagcgttgacgacaaggtccggattgacgtcgacccgaccaagcctatcgacccggagatcatcaagacgaaggacctctgcgtgaccggatatgcgctgaacaagttcaagggccaggtcggttggaaaacgcttctgcggtatacatgggtgtacgcccgcgtttcgccaaagcagaaagaggatatcctcttgggcctgaaggacatgggctactacaccctcatggctggcgacggcaccaacgatgtcggcgccctcaagcaggctcacattggtgttgctctgctcaacggcacccaggaagacctgactcgcattgccgagcacgcgcgcaataccaagatgaaggacctctaccagaagcaggttgacctcatgaagcgctggggccagccgcctccgccggttcccgtcatgatcgcccatctttacccacccggaccgtccaacccgcattaccagaaggcgatggagcgcgaggcccagaagaagggtgtcacggttgagcagcttgctaaggcaaacggcaccaatatcgagacggtcacttctccggccgcccggcagctgatagactcggaccctcgcaaggccaagcaggccgaggcatccaagaaggctgccggattggccgacaagctcacgcaatccatgatggacgccgagatggacgacgagccgcctaccctgaagctgggcgatgcctccgtggccgcgccgttcacttccaagctccgcaacgtcatcgccatccccaacattatccgtcagggccggtgcacgctggtggccacgatccagatgtacaagattctcgcgctcaactgcctcatcagcgcctacagcttgagtgttctgtacctggagggcatcaagtttggcgacgggcagatcaccatcagcggcatgctcatgagcgtctgcttcctctcgatttcccgtgccaagtcggtcgagggcctctccaaggagcggcctcagcccaacatcttcaacttctacatcatcgggtcaatcctcggccagttttcggtgcacgttgcgactctcatctacattgcgcagtactgcgaggttttggaacctcgctccgaagcgcccgatctcgaggccgacttctctccctcgctcctcaactcggctgtctacctcctccagctcatccagcagatctccaccttcgccgtcaactaccagggccggccgttccgcgagtcgctgtcggaaaataagggcatgttctacggcatcgtgggcgtcacggccatcgcctttgcctgctcgaccgagttcatccccgagctcaacgaggccatgaagctggttccgttcaaggacgagttcaagacgaccatcactgcggtcatgatcctggacttcgtcgcgtgctacgtcatcgaggtggtgctcaagtacctgtttagcgacctgaaggcgcgggacattgcggagcgcaggccggagcagcttgagagggagcgggagcgaaaggcggcggagctgaagaagagagaggaagaggaggagcggaagaggatggagaaggtggccgagttcgagaggaagctcgccgagaggcaggcagcgctcagggctcggactggaggacagagagcggcggcttaa

SEQ ID NO: 4083 - protein, 1318 aa, Myceliophthora thermophilia
MAPLVDNEQIQSAELLRPLPLYQHAYVWPFAIIWPVFLRYYLTPELYEKHIQAPEWTFVWVGTIITCQTLVWLCTHWSVNLNAAFTAKKARSVDDALLIKVIPAANAGSADICKLERTKVGDKTNTSFLFQKRRFLYNPETKSFGTLVYAIDTEPKPKLETFQKSRGITSAVDLERLEQHYGTNTFDIPVPTFTELFKEHAVAPFFVFQVFCVGLWLLDEYWYYSLFTLFMLVMFESTVVWQRQRTLTEFRSMSIKPYDIYVFRLGKWTQIQSDKLLPGDLVSVTRTKEDSGVACDMILVEGTAIVNEAMLSGESTPLLKDSIQLRPGDAPIDPEGLDKNSLLWGGTKVLQITHGSADEERPKLASGVPPPPDNGAMAIVTKTGFETSQGSLVRTMIYSTERVSANNAEALLFILFLLVFALAASWYVWDEGVRKDRKRSKLLLDCILIVTSVVPPELPMELSLAVNTSLSALAKYAIFCTEPFRLPFAGRIDVACFDKTGTLTGEDLVVEGIAGLGLGHSGTNTPRESDGAHSRMSPVHATSMETTLVLASAHALVKLDEGDIVGDPMEKATLNALGWSLGKNDILTSKPGAPGTVGTVQVKRRFQFSSALKRQSSVTSINATDPSTGRKLRGTFVAVKGAPETIMKMLVTVPKDYEETFKYFTRRGSRVLALAYKHLTTEGELGASKINDLKRENVEADLHFAGFLVLQCPLKEDAKQAVQMLSESSHRVVMITGDNPLTAVHVAREVEIVDRDVLILDAPEHSVHGEESLIWRSVDDKVRIDVDPTKPIDPEIIKTKDLCVTGYALNKFKGQVGWKTLLRYTWVYARVSPKQKEDILLGLKDMGYYTLMAGDGTNDVGALKQAHIGVALLNGTQEDLTRIAEHARNTKMKDLYQKQVDLMKRWGQPPPPVPVMIAHLYPPGPSNPHYQKAMEREAQKKGVTVEQLAKANGTNIETVTSPAARQLIDSDPRKAKQAEASKKAAGLADKLTQSMMDAEMDDEPPTLKLGDASVAAPFTSKLRNVIAIPNIIRQGRCTLVATIQMYKILALNCLISAYSLSVLYLEGIKFGDGQITISGMLMSVCFLSISRAKSVEGLSKERPQPNIFNFYIIGSILGQFSVHVATLIYIAQYCEVLEPRSEAPDLEADFSPSLLNSAVYLLQLIQQISTFAVNYQGRPFRESLSENKGMFYGIVGVTAIAFACSTEFIPELNEAMKLVPFKDEFKTTITAVMILDFVACYVIEVVLKYLFSDLKARDIAERRPEQLERERERKAAELKKREEEEERKRMEKVAEFERKLAERQAALRARTGGQRAAA

SEQ ID NO: 4084 - DNA, 1179 bp, Myceliophthora thermophilia
atggagcgcgccgcccccgagtattcgcagtcaggtttgccttcgccccatcccagtgtcgtcggcgacacgcagtctaaggcggaacctgtagatccggcatctgctgctcagtacgcgacacagccggaggcgcggtcagccagctactccaactcggccactcctacctcggaatatagcgtgtatccgacaacttcgaggtcggccacgttcccagacatgcagcgctcctaccaccccgccagcaaccctcccgggagcggtggcgggatgccgcagacaccaacaagtccgtccatgcctctgccagatgggcgcagccatcagaatccccagccggagcaggccaagtctgacagcgctctgcctatagatccttccattgcaggtgcaagcccgacatatgcaactcacagtcaatatcctccatatgccgccccgcccccagacatgtctcaagggtaccagcatccgggcaccccgggcttgtacacacagcctcgccccgactggggtggctacggtcagcagcctgccagtcacatcactcccggaacgcacatattccagcaggctcctccgaccaccgccgctcctggtcgtccgcatcaggtctatagcttcgtccccattcctggcgcacagcagcacaagcggcccaggaggcggtatgaggaaatcgagcgcatgtacaaatgtggctacaacggatgcgaaaaggcctatggcactctgaaccacctcaacgcccatgtgaccatgcaggggcacggtgctaagcgtactccagatttgtttaaggatattcgccgcgagtggaaagccaagaagaaggaggaggaagctcgcaaggctgcggctgccgaggaggagcgccagcgccaggctgctgctgctgcggcggcggcggcggcggcccaaaacggaggaaacacagatccacaaactggcgtggaggctgcgcaacccccgacgtcttatcccggctcgggaacagtccaactgccccctatcggttaccagccggcccgctacgcagggccgcctccggccggtatgcagcagccgatccccgagtacaacaactatcctagttactcgcccgcgtcaccttacggccagtcgaaccagcagatgtacaatacgcacaatggtggccagccgccgagccactag

SEQ ID NO: 4085 - protein, 392 aa, Myceliophthora thermophilia
MERAAPEYSQSGLPSPHPSVVGDTQSKAEPVDPASAAQYATQPEARSASYSNSATPTSEYSVYPTTSRSATFPDMQRSYHPASNPPGSGGGMPQTPTSPSMPLPDGRSHQNPQPEQAKSDSALPIDPSIAGASPTYATHSQYPPYAAPPPDMSQGYQHPGTPGLYTQPRPDWGGYGQQPASHITPGTHIFQQAPPTTAAPGRPHQVYSFVPIPGAQQHKRPRRRYEEIERMYKCGYNGCEKAYGTLNHLNAHVTMQGHGAKRTPDLFKDIRREWKAKKKEEEARKAAAAEEERQRQAAAAAAAAAAAQNGGNTDPQTGVEAAQPPTSYPGSGTVQLPPIGYQPARYAGPPPAGMQQPIPEYNNYPSYSPASPYGQSNQQMYNTHNGGQPPSH

SEQ ID NO: 4086 - DNA, 1371 bp, Myceliophthora thermophilia
atgatcagctcgcaagttggacacgcagaagctacaggagccgggggcttacacgggagccgcgacggcgctccgcctcggccggctcatcttgaaaagggcgacatcttcaggaccgtggggttacccgaagagctcaccattgggctggacgccatggccatgacaaccaacaagagcctccagggatttcgagagattccgccgggcacgcactttctctggattcagttgccaggcggcgtctctcgatctggctgctggttcatcacgggatccagggggttgctgcgcgtcaaggagtgggacaaatataacgagattctcggggagccggcaagctcgtccggggatgcacggagtcaacaggacagcttggaatccatatactcggcgctaaagccgtacgcgttgcacgcccatcgggataagtcatggacgccgatggacaacaaagatcctatctgggcgcgaaccccgggcagcctttggagcatcttgaccagcgccgtatcacgtcaagcactcgtcaggatcaccggaaagccagatgcccaggattacctcgtggagtccacggacggtgccaaagacgaccgccccctcgccgggcaaccccccgccggttcggggctgaacctcctattcacgcaggacttccgcgatcttcaagtcctcgaccaaggctcgatgagagaccgcgtcgccgacacctcgtcccggatccagtcccgcctcaccacggccgaccaaaacagccgaatcaccgagcgagacattctcgccgacctgcagttcaccttcctgaccggcacccacctgagcaactcggcgtgcctcgagcactggtggaacctcgtgttcaagatgctgctccgcgcatacggcctcgtgctctcacatccgagactggtcagagacttccttacggtcctctacgcccagcttttctacacggagcactatgtcgcctcgtcttcctcgcaaccggatcaccaggacgaggcggacgacaagggcaagaagcacgggccgagcagtgacagggccatcttccaatacaagccccagtacagggggagactccgtcaggtgctggccgagtaccggaggcggctaaacagtctgctcgaggggctgcgcggttcgaccactcccgaccaagaggctgtcggcagggcgtttgaggacctggaggcctggctgtggaggaagggctgggatctgagggaaggggagggcaagccgggaagcggcggtatcagagcggttactgcgccggatagcgaggacgaggaggacgagcagcctgttgtggtggaacttgatgagcaggggagagaggtagggttgctctcgtttagcgactaa

SEQ ID NO: 4087 - protein, 456 aa, Myceliophthora thermophilia
MISSQVGHAEATGAGGLHGSRDGAPPRPAHLEKGDIFRTVGLPEELTIGLDAMAMTTNKSLQGFREIPPGTHFLWIQLPGGVSRSGCWFITGSRGLLRVKEWDKYNEILGEPASSSGDARSQQDSLESIYSALKPYALHAHRDKSWTPMDNKDPIWARTPGSLWSILTSAVSRQALVRITGKPDAQDYLVESTDGAKDDRPLAGQPPAGSGLNLLFTQDFRDLQVLDQGSMRDRVADTSSRIQSRLTTADQNSRITERDILADLQFTFLTGTHLSNSACLEHWWNLVFKMLLRAYGLVLSHPRLVRDFLTVLYAQLFYTEHYVASSSSQPDHQDEADDKGKKHGPSSDRAIFQYKPQYRGRLRQVLAEYRRRLNSLLEGLRGSTTPDQEAVGRAFEDLEAWLWRKGWDLREGEGKPGSGGIRAVTAPDSEDEEDEQPVVVELDEQGREVGLLSFSD

SEQ ID NO: 4088 - DNA, 795 bp, Myceliophthora thermophilia
atgcacaaggagcacgaagtgttctggagcggccaagcacaagtacccggtgagtccacggacggtgccaaagacgaccgccccctcgccgggcaaccccccgccggttcggggctgaacctcctattcacgcaggacttccgcgatcttcaagtcctcgaccaaggctcgatgagagaccgcgtcgccgacacctcgtcccggatccagtcccgcctcaccacggccgaccaaaacagccgaatcaccgagcgagacattctcgccgacctgcagttcaccttcctgaccggcacccacctgagcaactcggcgtgcctcgagcactggtggaacctcgtgttcaagatgctgctccgcgcatacggcctcgtgctctcacatccgagactggtcagagacttccttacggtcctctacgcccagcttttctacacggagcactatgtcgcctcgtcttcctcgcaaccggatcaccaggacgagtttggcagatcatcgtgcggcgctagccatcggcacccagccacagccacggcgttccccctccccccctccccccttcgttggagctttgaccggccgttcacaggatcagatgccctcgccagactgtgggcccttggtgttcgtcgttcgcttcggagcttagtgtacactacaagtaacgttggtgtatcataccacctcggcgcagcggctagtccgatcggagcgaaactccaccgccggccgaatcaagggctgatcaggagctgggccgagctccggagagtaacaaccgacaagccatga

SEQ ID NO: 4089 - protein, 264 aa, Myceliophthora thermophilia
MHKEHEVFWSGQAQVPGESTDGAKDDRPLAGQPPAGSGLNLLFTQDFRDLQVLDQGSMRDRVADTSSRIQSRLTTADQNSRITERDILADLQFTFLTGTHLSNSACLEHWWNLVFKMLLRAYGLVLSHPRLVRDFLTVLYAQLFYTEHYVASSSSQPDHQDEFGRSSCGASHRHPATATAFPLPPSPLRWSFDRPFTGSDALARLWALGVRRSLRSLVYTTSNVGVSYHLGAAASPIGAKLHRRPNQGLIRSWAELRRVTTDKP

SEQ ID NO: 4090 - DNA, 1941 bp, Myceliophthora thermophilia
atgaccagcaaatccgctaaacagtcatcccatgagcgtcggaaaggcgaggctgctctcagcgactttgccgagtacgtcgagaagcagcaggctctccgatacccgagctccaagcaggtggcggcgacggcggcagctggtagcacccagggagatcttgaacaccacgaggaactagatgacattctcgacagcctcgacctctctgatccgaccccgcgtgtgaggttacgagaacttctactgtcttccagcggtgatgccgatgccctccagaaactggtcgacatcataagcgagcggttgtccgaaggccatggagagactgtattcgacgttggattcgagaacaatggcgagagtatgaggttgtctcgtgatgagtgggaagtggcgatgggccgactagcggaagcagcaaagaagctgcgagccgacacccagctactcttgacgaaaaatgtgggcggcgacctggatggggcgccgacaaaggacggcgattgcagcgggaaagtcatgatccggaaagctccggccacggttgaggaggtcatcgaaacgaggatagctgtcgttggaaatgtagacgcaggcaaaagttccatgctcggtgtccttgtcaagggcgaccttgatgacggtcggggcaaagcacgggtcaatcttttccgacacaagcacgagatcgaaacgggacggacgtcgtcggtcggaatggagatcatgggattcgacacaacgggccaggtagtggtttccgacaccccgggacgcaagctgtcgtgggaggagattgggaagcgcagcgccaaagtcatcacattcactgacctggcgggtcacgagcggtatttgcgcaccacggtgtttggactcttgtcgagcagcccaaactattgcctgctcatggttgcggctaacaacgggctgatcggaatgagcaaagagcacctgggcatcgcccttgcgctgaatgttccggtcatggtggtcatcaccaagattgacatttgtccgccgcagattctggagcaaaccatcacgcagattactcgggttctcaagagccctggggcaagaaagatacccattttcatcaagaaccgcgaggagtgcatcaacacggccacgcaatttgtgagccagcgaatctgccctatctttcaagtatcgaacgtgactggcgagaacctggatctggtccgctcgttcctcaacatcctgccacatcacggccgctacgatgccgatgccccgttcgagttccatgttaacgacacatttagcgtcccccacgtcgggacagtggtttctggaattgtcaaatccggcgtcattcacgccggagatgatgttcagatcgggccggattctctggggcgcttcatacagacctccattcgatccatcgagaggaaaagaataggcgtgccagcggcttcagcaggccagtctgcctcctttgctctgaggcgagttcggaggaaagacgttcgtaaaggaatggtagtgttgccaaagtcagacggagctcctcccaaagtgtaccgcgaatttgtggctgaagtgctcatcctctcgcacgcaacaaccatcaagaccaaataccaagcaatgctgcacgtcggaccagtctctcaaacctgcgcaatcattgacgtcgaccgtccttttatccggactggagaccgagctacggttgctttccgcttcgtgcagcggcccgagtatctagcacccggtgatcgcctccttttccgggaaggaagaacaaaaggcctgggcatcgtcaaaagcgttgggtacgacccttccaagccgctcatgtcgaagcagtcggaaagcggtgttggtgacgaacagcagccctccggccacgcggcccgagagaagtcggatgataaggtggcccgtgacatgaagattgaggcatga

SEQ ID NO: 4091 - protein, 646 aa, Myceliophthora thermophilia
MTSKSAKQSSHERRKGEAALSDFAEYVEKQQALRYPSSKQVAATAAAGSTQGDLEHHEELDDILDSLDLSDPTPRVRLRELLLSSSGDADALQKLVDIISERLSEGHGETVFDVGFENNGESMRLSRDEWEVAMGRLAEAAKKLRADTQLLLTKNVGGDLDGAPTKDGDCSGKVMIRKAPATVEEVIETRIAVVGNVDAGKSSMLGVLVKGDLDDGRGKARVNLFRHKHEIETGRTSSVGMEIMGFDTTGQVVVSDTPGRKLSWEEIGKRSAKVITFTDLAGHERYLRTTVFGLLSSSPNYCLLMVAANNGLIGMSKEHLGIALALNVPVMVVITKIDICPPQILEQTITQITRVLKSPGARKIPIFIKNREECINTATQFVSQRICPIFQVSNVTGENLDLVRSFLNILPHHGRYDADAPFEFHVNDTFSVPHVGTVVSGIVKSGVIHAGDDVQIGPDSLGRFIQTSIRSIERKRIGVPAASAGQSASFALRRVRRKDVRKGMVVLPKSDGAPPKVYREFVAEVLILSHATTIKTKYQAMLHVGPVSQTCAIIDVDRPFIRTGDRATVAFRFVQRPEYLAPGDRLLFREGRTKGLGIVKSVGYDPSKPLMSKQSESGVGDEQQPSGHAAREKSDDKVARDMKIEA

SEQ ID NO: 4092 - DNA, 3486 bp, Myceliophthora thermophilia
atgccgacaacctacgttgctccgggttgcgacccattgttgcaagatattgcaaataccttgtggaagtcgcggaaggtcgtcgtcattactggtgccggcatcagcaccaactcgggcatcccggacttccgctccgaaaatggtctgtactccctgattcaggcccaatttgacgccgctcagcagcaagctacggaaaacaacggcgacgctggtggacaggacgcagagcagagaccagcgaagcgacagcggaagacgttagacgaccccgagcttgggcgccgccgggcgtcccgagatcatggactaccattcccagggctgcgcggtgccacagaaaagtcgaatgacaccagaacggatcagaacaccgaaaacaccgagtccgaagaaaagcagcaccccgccaggcacgaggattcgctctcggagagaggggccgaacgagcgcaggcccctgatgaaaacaattccctcccacaatccgtgcctagttctcccgactcgaaggcgaaccgtctggcggacgctcaacatcccaacccggagaatgcaccctgcccatcgtcccctcccagctttgtccttggcaccccgcacccgcgaagagcccatctcctcgaaacgctccccggaagctcctcgcctctctcgtctccaccccctatcatgtacgatccttatcaggagacgacaagctgctcgtccgacagaggcaccgagtcgtcccggtctcagagcgaggaaccgtcttcagcaactacccctctcctctcgtcgcaaacgtccatcacctctcgaacgtcgcttccttcgatgaaagggcgcgaccttttcgatgcccaaatctggtcgtgccccatcaaaacatcggtcttttacacctttgtgtccacgcttcgcgagaaagtgcgaaatgccgaacccacgattagtcaccggtttgtcagcgtcctccgagacagcagaaagctggtcagatgctacacccaaaacatcgatcagctggaggaacgtgtcggccttagtacctcgttatctctgggcgccgggagccgataccgcttctccaccagagccgggcggaacagcggcgcggcaaaaggacaagcgaggggcgccgatggggcacccgaggcaaatcaggcggcatcccagaaggacgaggatcaggagcgatcacggacgacgcagccggactcaaccaatgtgcaggacgagggctctccgccggcttcacagcaaacagttccagcggcgcccaaccgcggagttgagtgtgtgttcctgcacgggtccctggctgaacttcgctgcttcgtgtgcgcccgcaccgcttcatgggaagaagacgaccgactagaggacaccctcgccggtcggcaaccaacctgtccacattgcgccggggcgactgctgcccgggaagaaaagggcaagcgagccctcggagtcggcaagctccggccagacatcgtcctctacggagaagagcacccacatgcccacctcatcagccccctggtgcagcacgacctctcgctaggccccgacatgctcctgatactggggactagcatgcgtgtccacggactcaaagttcttgtgaaggagtttgccaaggcggtccacgatcggggagggaaggtagtgtttgtgaatttcaccaaacctcccgagagcgtctgggccgatatcattgattattgggtacaatgggactgcgatgcctgggtcaccgatctccgagccaggaagccggcattgtggcttccgcctggtgccgcccttcctgaggaagagaagcccaagaccgccagactgtcgcgcaggcaaagtggcgccgagtctagcaaacggaaagataaagccgagaaaattacgaagaagagggagagcgatgacctggcgaacaaccggaaagaggaaagcggagaagaaccaaagcaagatgcagatgcacaggcccccataaatggacatcaggaggataaaccgccaaccccgccgaaggaagtttctaagaaagcggccaagattccgagggaaccgaagctcaaccccgacgcgaagcgccctgcgtcggttcgggaccataagctgaatggggcctaccttgttggcaaaatcatggaagacctacgacgcatcaccggggatgggccggtgaactccgtagcttcatcttcggacgcggtcgcggccaattccaaacgaaagaggcctcgaaagtcggctcctgcggcgcttaacgttcaaggggtcccggcagatcacggtgtcatcccggagccatgtccaactgctacgacagaggcgcaagcagcaatcccagcatcgtcgcccgtatcgaaggccctgccctcggatactctgagcggcaacaatggtaacagctccatctcggcggcagtcaaaagtcgcagacggaagcaggccgttgcatggcgcataataggcggtgtcgagactcgtgtcacactcaacaacacagcagaaccccaaatgccagtggcatcatctttgcctcgctcccaagccgtccttcggccctcaccggtgcctcaccaccgccggctaccgccgccgacaccaacgacacctaagccaacgcccccataccagcctaacaatacccagagccatattcctcgtccgcaacccatcaccgcggcccccccggcatcggcaattgatatggctatcaatgctggcttccgtgagacggaccgcctcatcgcacaagttcaccacgagactctactctcccgccccgcgacgccgtcgcaactgcgtcttccgccgttattagcagcaaatctccccgaccagaggcatcggccggggcaatcaaacgacaacaattacaacagccaacaacagcatatttgggagcagcaacaacagcacaacgttgagcactggcagaaaggcggacgaggggcccagcagccacaacaaacacaccatctaccgccccaccagcaggaccagtatcccacaacgaaacttgttcccctcgaaccgaaagtggattcgcccggtccgcgccaggcgatctcctccaacgtggggagtccggtcgcatgcgcatccgcggggaggaacccgttcttcctttccgacccgttggccggatggttgggatacccgcccgtctggctgcaccatcacccaccacatcatcttcatcctcatcatcctcaccagaagtttcgaacagacatgccgccgcagcaacaacggagggattacggcgggaacaactatgacgggagcgacggccgcagcggcgcgactgacgatcggaaatgcagcagggttgcggatacggattcgggcacggggtcggatgcaaagagggaacagcagcgggagacggaggcgtcatcgccatggtgtccaaacgagcagctcaggaaggagcaggaggcggctctgatgctctctgccatgcgtggaacgggagaatatcgttga

SEQ ID NO: 4093 - protein, 1161 aa, Myceliophthora thermophilia
MPTTYVAPGCDPLLQDIANTLWKSRKVVVITGAGISTNSGIPDFRSENGLYSLIQAQFDAAQQQATENNGDAGGQDAEQRPAKRQRKTLDDPELGRRRASRDHGLPFPGLRGATEKSNDTRTDQNTENTESEEKQHPARHEDSLSERGAERAQAPDENNSLPQSVPSSPDSKANRLADAQHPNPENAPCPSSPPSFVLGTPHPRRAHLLETLPGSSSPLSSPPPIMYDPYQETTSCSSDRGTESSRSQSEEPSSATTPLLSSQTSITSRTSLPSMKGRDLFDAQIWSCPIKTSVFYTFVSTLREKVRNAEPTISHRFVSVLRDSRKLVRCYTQNIDQLEERVGLSTSLSLGAGSRYRFSTRAGRNSGAAKGQARGADGAPEANQAASQKDEDQERSRTTQPDSTNVQDEGSPPASQQTVPAAPNRGVECVFLHGSLAELRCFVCARTASWEEDDRLEDTLAGRQPTCPHCAGATAAREEKGKRALGVGKLRPDIVLYGEEHPHAHLISPLVQHDLSLGPDMLLILGTSMRVHGLKVLVKEFAKAVHDRGGKVVFVNFTKPPESVWADIIDYWVQWDCDAWVTDLRARKPALWLPPGAALPEEEKPKTARLSRRQSGAESSKRKDKAEKITKKRESDDLANNRKEESGEEPKQDADAQAPINGHQEDKPPTPPKEVSKKAAKIPREPKLNPDAKRPASVRDHKLNGAYLVGKIMEDLRRITGDGPVNSVASSSDAVAANSKRKRPRKSAPAALNVQGVPADHGVIPEPCPTATTEAQAAIPASSPVSKALPSDTLSGNNGNSSISAAVKSRRRKQAVAWRIIGGVETRVTLNNTAEPQMPVASSLPRSQAVLRPSPVPHHRRLPPPTPTTPKPTPPYQPNNTQSHIPRPQPITAAPPASAIDMAINAGFRETDRLIAQVHHETLLSRPATPSQLRLPPLLAANLPDQRHRPGQSNDNNYNSQQQHIWEQQQQHNVEHWQKGGRGAQQPQQTHHLPPHQQDQYPTTKLVPLEPKVDSPGPRQAISSNVGSPVACASAGRNPFFLSDPLAGWLGYPPVWLHHHPPHHLHPHHPHQKFRTDMPPQQQRRDYGGNNYDGSDGRSGATDDRKCSRVADTDSGTGSDAKREQQRETEASSPWCPNEQLRKEQEAALMLSAMRGTGEYR

SEQ ID NO: 4094 - DNA, 1494 bp, Myceliophthora thermophilia
atgtcaaagcgaatggcagacgaagataacaccggcccactcaaggccggtgggcgtcccgacgccatggacgtcgacgagacgcccgccgacatgggcgagtttgaggacgaattcgaagacgaattcgagagcgaggacgagattattgaagctggcgtcgacggcaggccggacgcggagcgggaggctgaggaggcaatggacgtggacaatgcaaccccgggaaccttcattgtcggcaggacgaagctcgagccgggccagaccctctcccccgacccgacaacctaccgcatgcttcacaacctaagcaccccgtggccatgcctctccttcgacatcatccgcgatggtcttggcgacaaccggactgtataccccgcgaccatgtacacggtggccgggacgcaggccgacagcgccaaggccagcgacaactccatcatggtcatgaagttcagcggcctcagcaagatgcagggcagtgacgaggacgaatcgagcgacgatgagagcgatgacgaggacgcggatcccatcctcgaacacaagagcatcccgctcaacaccacgaccaaccggatacgagtccaccagactccttcccaggacccctcgaagcccccaaccaccctgacggcggccatgaccgagtcgaccaacgtcttcatccacgatatcacaccccacatcacctctttcgatacccctggcaccattgtcacgccccagcagaacaagccgatctgcaccatccgcgcgcacaagtcggaagggtacgcggtcgactggtcgcctctccacgccgccggcaagctcctgacgggtgacaatgacggcctcatctacgtcacgacacggaccgacggcggcggcttcgtcacggacacgcgccccttccagggccacacatccagcgtggaggagatccagtggagtccgtccgaggcgtccgtcttcgcgtccgcgtcgagcgacggcaccatccgcgtgtgggacgtgcgcagcaaggggcgtaagcccgcgctctccatgcaggtcagcgacgtggatgtcaacgtcatgtcgtggtcgcggcagacgacccatctcctcgcgtccggcgacgacgcgggcgtgtgggcagtttgggacttgcggcaatggaagccgagcgcgggtgcggccgctgcgtcgagtctgcagcgaccgagcccgattgcgagcttcaatttccacaaggagcaaatcaccagcgtggagtggcacccgacggacgacagtatcgtggcggtatcggcgggagacaatacggttacgctctgggatctggcggtggagttggatgacgaggagagcaaggacaccgcggggatacaggatgtgccgccgcagctgttgtttgtgcactaccagaacctggcaaaggaggtacactggcacccgcaaataccgggcacgctggtggccacaggtgaagagtttagcatcttcaggacaatcagcgtgtag

SEQ ID NO: 4095 - protein, 497 aa, Myceliophthora thermophilia
MSKRMADEDNTGPLKAGGRPDAMDVDETPADMGEFEDEFEDEFESEDEIIEAGVDGRPDAEREAEEAMDVDNATPGTFIVGRTKLEPGQTLSPDPTTYRMLHNLSTPWPCLSFDIIRDGLGDNRTVYPATMYTVAGTQADSAKASDNSIMVMKFSGLSKMQGSDEDESSDDESDDEDADPILEHKSIPLNTTTNRIRVHQTPSQDPSKPPTTLTAAMTESTNVFIHDITPHITSFDTPGTIVTPQQNKPICTIRAHKSEGYAVDWSPLHAAGKLLTGDNDGLIYVTTRTDGGGFVTDTRPFQGHTSSVEEIQWSPSEASVFASASSDGTIRVWDVRSKGRKPALSMQVSDVDVNVMSWSRQTTHLLASGDDAGVWAVWDLRQWKPSAGAAAASSLQRPSPIASFNFHKEQITSVEWHPTDDSIVAVSAGDNTVTLWDLAVELDDEESKDTAGIQDVPPQLLFVHYQNLAKEVHWHPQIPGTLVATGEEFSIFRTISV

SEQ ID NO: 4096 - DNA, 1653 bp, Myceliophthora thermophilia
atggacgccgaataccaatccctgatcgatgctttccgggccgggcagaagaagcccgagtttcccagcaactttgattcgagggagtatgcgagacggttggatgcccaagataagctcagttttcttcgagacagtttcatcattccaaccaagggttccttgcggaaaaaagcccttacgggcaccttgcccggagagcataagcgagttggaacgctcgacggagaagggaagggtacggagcagaacggcagtaaaaacagcagcggcaacgccgaggatgaagagccagccatctactttgtcgggaactccctcggcgcacagcccaagtccatccggacgcacctggatgcgcagttggagacatgggcgtctataggggtcaacggccactttacctcgctcgacaactctcccctgaccgcctggcaggacatggccgcggactgtgcgcgaaagtcggtggacctcgtcggcgcggcgtcaccaagcgaggtcatctacatgaacaccttgaccgtgaatctgcacctgatgatggccagcttctaccagccgacagagaagcggcacaagatcattgtcgaatggaagcccttccctagcgactactacgccatcacctcccagctagaatggcacggcttgaacccgtctacctcgctggtggagatccacccagacgacccggagacgcagtacatgtcgacggcacacatcctctcggtgatcgacgagcacgccgacggcacggcgctgctcctgctcccggggatccagtactacacgggccagctgctggacgtggcgcgcatcacggcgcacgcgcgcgcgcgggggatccccgccgtcggctgggacctggcccacgccgtgggcaacgtcgagctggccctgcacgactggggcgttgactttgccgtgtggtgcacctacaagtacctcaacgccgggccgggcgccatcgccggcgcgtttgtccaccagcggcatcaccggcttcgtcgggaagaagacgatggcgaaggcggtgcgaacgatcacgacaccgccggctctaataatagtgctaataatgataataatggtgaccgaccgtcggggccgcgctacgtcccccgcctgtccgggtggtacggcgcagacaaggcgacgcggttcgacatggccaaggagttccgccccgcggagggcgcacacgggtggcaggtgtcgaacccgagcgcggcggacctggcatgcgtcggggctgcgctgggcctgtttgagcgcgcgggcatgcgggcgctgcgggacaaggcggtcgtgctgacggggtacctggagcgcttgctgctcgacttgctggaccggagcggagtgacgggaagacggaatgaggcgggtgagccggcgttccggatcctcacgcccgcagacccgcgcgagagggggtcgcagctgagtttgctgctgaggcccgggttgctggaccgggtgagcgggaggctggccgaggccggcgtggtggtggatgtgcggaagccggacgtgatgcgcgtcgcgccggtgcccatgtactgccggtttgaagacgtctggatatttgtacgggagctggagaaggcgctggagcgagcaatcatagagcacacccaaacaaaatga

SEQ ID NO: 4097 - protein, 550 aa, Myceliophthora thermophilia
MDAEYQSLIDAFRAGQKKPEFPSNFDSREYARRLDAQDKLSFLRDSFIIPTKGSLRKKALTGTLPGEHKRVGTLDGEGKGTEQNGSKNSSGNAEDEEPAIYFVGNSLGAQPKSIRTHLDAQLETWASIGVNGHFTSLDNSPLTAWQDMAADCARKSVDLVGAASPSEVIYMNTLTVNLHLMMASFYQPTEKRHKIIVEWKPFPSDYYAITSQLEWHGLNPSTSLVEIHPDDPETQYMSTAHILSVIDEHADGTALLLLPGIQYYTGQLLDVARITAHARARGIPAVGWDLAHAVGNVELALHDWGVDFAVWCTYKYLNAGPGAIAGAFVHQRHHRLRREEDDGEGGANDHDTAGSNNSANNDNNGDRPSGPRYVPRLSGWYGADKATRFDMAKEFRPAEGAHGWQVSNPSAADLACVGAALGLFERAGMRALRDKAVVLTGYLERLLLDLLDRSGVTGRRNEAGEPAFRILTPADPRERGSQLSLLLRPGLLDRVSGRLAEAGVVVDVRKPDVMRVAPVPMYCRFEDVWIFVRELEKALERAIIEHTQTK

SEQ ID NO: 4098 - DNA, 129 bp, Myceliophthora thermophilia
atggctataagctataaagataggggcaatgatatagatagtctcggatataacggtaatagtaaagataaacaagtactatactctaaactaattactatagacctagagataggtcttgccaaatag

SEQ ID NO: 4099 - protein, 42 aa, Myceliophthora thermophilia
MAISYKDRGNDIDSLGYNGNSKDKQVLYSKLITIDLEIGLAK

SEQ ID NO: 4100 - DNA, 165 bp, Myceliophthora thermophilia
atgtggtcaaaacgtgagctcagcaaggacttgggtaccactgtctgtctgctagaggaggaagaacaggaagcgagggcagacgagggcatctgtgatgttttcaagggtaaccatggcgccggcaagttgcaacatcgacaatatgagccgagcggcctgtag

SEQ ID NO: 4101 - protein, 54 aa, Myceliophthora thermophilia
MWSKRELSKDLGTTVCLLEEEEQEARADEGICDVFKGNHGAGKLQHRQYEPSGL

SEQ ID NO: 4102 - DNA, 1026 bp, Myceliophthora thermophilia
atggtggactcgcacggagttagtcgccgtgagaggacccttggtgccctccttggggtgcacgctggcgactccctgggtgccacagtcgaattccagagctgggaggatatcaagaacgattacccacgtggtgtgcgggatatcgtcggcggcggagtcttggactggccgccgggacatgcaacggacgacacggacctgacccgagccgtgctcctcgcctaccgcgatgccgaggagctgaagcgatcccagccgaccgagtcaccggacgtggtgaagctcgctgcgcagtatatggtcgagtggtacgatggacggtggcctggacgcaccccgggccagataccccgcgacatcggcggcgccacggctacggccatggctaatttcaagcgcacgaacgacccgcgggcatcgggggcgggcgagggccgggcggggaacggatctcggccatcaatcacgcacgacgactaccactgcaccatcgcctgtgccgcatacaacgccatggtgcgggtcctggtcgacggggggtcggccgacgaagcttggcaggcggggaagagcacggcggcccaggtcccgtctctcgccgcggcagggccggcggccgctcgcaaggagaagatggagcgcgcggcaaggcaggtcgaggcggccatcgacgcgggcaagcggctcgtgcgattgcaagacctcgccgagaacggaccggaaaaggcgaacaacacgaccgaggtgctgccgttcaaggggtccggctacgtcttggagtcgctcaccctggccgttgctgccatgttggatcctcggccgcttgaggacgtgctggtcgatgtggtgcggttcggtcaggacgccgactcaaacggcgctatcgccggcggcctgcttggggcgagggatggtgtcggcgctattcccttgcggtggagagagctgttacaatttggcaaggagttcaccgaggttacagagtatctgctttcgtgccacaaccacgggagcagtggatga

SEQ ID NO: 4103 - protein, 341 aa, Myceliophthora thermophilia
MVDSHGVSRRERTLGALLGVHAGDSLGATVEFQSWEDIKNDYPRGVRDIVGGGVLDWPPGHATDDTDLTRAVLLAYRDAEELKRSQPTESPDVVKLAAQYMVEWYDGRWPGRTPGQIPRDIGGATATAMANFKRTNDPRASGAGEGRAGNGSRPSITHDDYHCTIACAAYNAMVRVLVDGGSADEAWQAGKSTAAQVPSLAAAGPAAARKEKMERAARQVEAAIDAGKRLVRLQDLAENGPEKANNTTEVLPFKGSGYVLESLTLAVAAMLDPRPLEDVLVDVVRFGQDADSNGAIAGGLLGARDGVGAIPLRWRELLQFGKEFTEVTEYLLSCHNHGSSG

SEQ ID NO: 4104 - DNA, 759 bp, Myceliophthora thermophilia
atgtacaagaagagaaaggaagaacctgggatgagggacaagagtaagggaaggcgcacgaatccccggcagtcgcgtcagggctccacgccgtccctcggtattccgagtcgcttcaaccctcaggctctcgctgaaagcgagagcagcagcagcagcctgtggcagcaggcactcgcacggaaggaactggctgcagcatccacacccactctccgcgtttccagctcccgggccgagacgcacctcatccgctgtcgccatctgcggaaagtgtcagcgggagcaaagtctgtccgtgtagcatgggccgccgccgcttacttgcaggtcgcgtttgtttcctactacccaacgtcggactttagctttttgggtagctcttggtcgaacgacaagttccaagctgtcggaagcatccgtaacgcatgttacgcctcctgcgccttcccaaccctgagttcgcatcagtgccggcgcctggattcgctagcgtcagtgggtccattatctccgcggccggccggctggcaagtgcggcatcaggggttccgagggtcctgcacacaaaacggcagggtcctaagtcttgggttgacaagctccgattgctggttcagtgggcattccccccagctgtgcgctcaacagcgcacattcatcttgaggcaacaacaccgtggtaggttcctctgctacgcatataacccaagcagtccgctcgtggagtaccagcactgtcattctggcgagaaataa

SEQ ID NO: 4105 - protein, 252 aa, Myceliophthora thermophilia
MYKKRKEEPGMRDKSKGRRTNPRQSRQGSTPSLGIPSRFNPQALAESESSSSSLWQQALARKELAAASTPTLRVSSSRAETHLIRCRHLRKVSAGAKSVRVAWAAAAYLQVAFVSYYPTSDFSFLGSSWSNDKFQAVGSIRNACYASCAFPTLSSHQCRRLDSLASVGPLSPRPAGWQVRHQGFRGSCTQNGRVLSLGLTSSDCWFSGHSPQLCAQQRTFILRQQHRGRFLCYAYNPSSPLVEYQHCHSGEK

SEQ ID NO: 4106 - DNA, 1032 bp, Myceliophthora thermophilia
atggatattgatgacgaagacgatttctacgccccagaggaaccccaacctccctcacaaccagcgccagcagaagctgccccggtatcaaagaaggatgcaaacgaagaactagagtcgggcgaggaggaggacgaagggggggcgatggacgaggatgaggattctgatatcgacatcatcacagaacgaaaggacgggtcaaacccggcccctccacctcaatcccgctacagcgagataaagaacatacctcaacgtacggcaacctccgatggagcgacaaccaccaccagtcggaaacccgcatcggcgcagcagacctcggctccatcaacagaaaccaccgcccccgtgtccacctccaagctcgacatcaacgcgatcccaatccaccagccctccggcaagccgctcacgcaggtcaacatcgacacggacctacccgaggaccacgagagaccgtggcgcaagccgggcacggacctgtcggactacttcaactacggcttcgacgagttcacgtgggcgctgtacgcgcagaagcaggagaccctgcggagcgagtacaaccccgaggcgatcgcggccagcaacaagaagatgatcgaggacatgaccaacatgatgatgatgggcggcctggggctgccgccgccgccggtgccgggcgggcccgtgggaccgggcggcgccggggcggggcaacccgggggcggggtcgggccgggcgccggtggggtcggccagatgcccggcatggagggcatgccgcccgagatgcaggccatgatgcagcagatgatggccggcgggatggacccgagccagatggatatgggggccatggcgggcatgtttggcgggggcggtggaggtgccggcgggccgggacaaggcggtcagggacagggctttggcggagggttcggcgacgggcagggccaaggatacggcggctatgggcaacagatgggaggtggtggaggtggtggcgggagagggggcaggggaagaggcaggaggtggtag

SEQ ID NO: 4107 - protein, 343 aa, Myceliophthora thermophilia
MDIDDEDDFYAPEEPQPPSQPAPAEAAPVSKKDANEELESGEEEDEGGAMDEDEDSDIDIITERKDGSNPAPPPQSRYSEIKNIPQRTATSDGATTTTSRKPASAQQTSAPSTETTAPVSTSKLDINAIPIHQPSGKPLTQVNIDTDLPEDHERPWRKPGTDLSDYFNYGFDEFTWALYAQKQETLRSEYNPEAIAASNKKMIEDMTNMMMMGGLGLPPPPVPGGPVGPGGAGAGQPGGGVGPGAGGVGQMPGMEGMPPEMQAMMQQMMAGGMDPSQMDMGAMAGMFGGGGGGAGGPGQGGQGQGFGGGFGDGQGQGYGGYGQQMGGGGGGGGRGGRGRGRRW

SEQ ID NO: 4108 - DNA, 3300 bp, Myceliophthora thermophilia
atggcttgcagctccggttgttgtgggaagccagcttcacctcctcctcccgagcagcctaactccaaccccgcttccactccggaccaggatgatggggacagctgctgcgacggcgcgaacacgatagccggcgagaactccgaccagcccggccttgctggcgccgcgcgtgatgagtctatcgaggaggacgactgctgcgctcccaagccatcagcgcccggctgcaacaacaagggctgctgctctgcgcctgcgcctgcgcctgcgcctgtgccgaagccgccgcgacccgaagacatacacaagtccagctgctgcgagggcaaaccagctccctgctgcgaccagtcctgcctcgatcgcctcgcactgcgcgaatgcgagaagtacgcgtgcgaccttacagccgacagttcgactatctccacctgcggccgagctaaggacggcaagccgtgcgccgagcatgcgaacaaggcccgcctgacgtacgcagagagactcgaggctctcggctgtatctgccgtgccctgatcgccctcggacaagagtcttgctgcctgccttctcgccgtccgtccaccggcagcgctcgccgccgccgccgccgctctaaggacctgttgctccaccaagaagcgaccgggctcgcaaggaaaaagaatgaatgtcgcagctcctccgatgggacggaggctgccgctcctgagcctcctagaattgcgggctcttgcgctgattcctgctgcgccgaagagcgaccggtcggtcacgtcaatgaggtgaaggaatttctttcggacgtagcgaacgccaccaccgatctcgagaaggctttcgcgcgaaatgaaaaggaacacgtcattctcagcatctctggtatgacgtgcactggttgtgagacaaaactagtccggaccctcggcgtccacccggcggtcaggaatctgaagaccagtttggtcctttctcgcgccgagtttgacgtgatcggtgctgcttctgtggtcgacgtcatgaagcatctcgagagaacgactgagtttaagtgcgagagggttacgaacaaaggctcaagcctcgatatcctcgctccggatggcgatgcggccgctctcatcaaccgaccttggccggacggggttaccgaagtcagactcgtggacaaaaagaccgtcaatgtcagcttcgaccccaagatcattggagctcgggatctcgttcgacacggttggggcgacggccaggtcaatctcgcgccgccccgccccgacctcacgctcgaagcaggcagtaggcatgttcgtcacgtcggctacatgaccttactctccgcgtgccttactgtccctgttctggttatggcttgggctccgcttcccgaacgcgacatcgcgtacgactcggcatccttggcattggcaacgatcgttcagttcgtcatcgcgggacccttttacccgaaggccctcaagagtttcatattctcaagaatcattgaaatggacttgctcattgttttgagcactagcacggcttacatattctcgctggtctcgttcggctacctcgtatcgggccggccactgccgacgggcgaattcttcgaaacgagcaccctgctggtcaccctgatcatggtcggccgatgggtcgctgccttggcccgtcaaaaagccgtgaagtccatctccgtacgatctctgcagacccctaccgccctcctcgtgaacgacgacggagaggaaacggagatcgacgcccgccttcttcagtatggggatgtttttaaggtcgttcctgattcgagaatccctaccgatggcacggtagtgtcaggctcatccgaagtagacgagtccatgatcaccggtgagtccaggccggtggagaaacacgccagatctccagtcattgccggatcggtgaacggatcgggcacgctgcgcgttcgggtgacgcgactccctggcgacaatactattagtaccatcgccggcatggtcgacgaggcaaagttatctaagccaaaaatccaggacctcgcagaccgtgttgcgagctactttgtcccggttgtcgttgccctgacgattatcacgttggctgtctggattgccatcggtgttgctgttcgccaacaaccgggaaaggaggctacggttcgagcaatcacctacgcaatcgcagtcctgatcgtgtcttgcccctgtgctattggccttgcggtccctatggtcatcgtcattgcgagcggtgttgccgccgagcgaggtgtcattttcagatcggcggagagcatcgaggtcgcccataggacgtctcatgttattctcgacaaaaccggcaccatcaccgaaggcaagctatcagtggctcgagagtggtatgcggaaggtaaccaagacaccaccaagtcactgcttctcggcctggtagggagcatcaaacaccccgtctctgctgccgtagcaacccacctaaagacgcaaggcgtgtctccctcactggtatctgagccgaagaccctgacaggaaggggtgtcgaaggcgttgtcgaggggtctggctcgctccttcgggcgggtaattcacggtggctcaacctcgattccgatccagaagtacagtcggttttgtcgcaaggatacacggcattctgcttcaccatcgccggttctgttgccgcagtctttggtctccaagactcgattcgaccagacgccgcttctacggtcaagaccttgctcgaacgtggcatatcggtccacatcatctcgggcgacgacgacggtgccgtgcgctccgtaggcgcacagttgggcattgccgagaccaacctccgatctcgctgtaccccctctgacaagcaagcgtacattaaaggacttcttgggggcaccctctccccgaatcaaaccacaaagcgcaagaagccagtcgttctgttttgcggcgatggtaccaatgacgcggttgcgctagcccaggccaccatcggcgtgcacatgaacgagggcgggaccgacgtcgccaactcggcggctgacgtcgtcctcatgcgccccaagctcgccggtatcctcaccatcctcgccgtgagcgagaagtcgattcgaaggatcgccttcaacttcggctggagctttgtctacaacctctttgccatcctgctcgccgccggcgcatttgtccacgccaggatcccgcccgagcttgccggcttgggcgagctggtcagtgtcttgcctgtcatcgctgcggccgtgatgctacgatggtccaagatctga

SEQ ID NO: 4109 - protein, 1099 aa, Myceliophthora thermophilia
MACSSGCCGKPASPPPPEQPNSNPASTPDQDDGDSCCDGANTIAGENSDQPGLAGAARDESIEEDDCCAPKPSAPGCNNKGCCSAPAPAPAPVPKPPRPEDIHKSSCCEGKPAPCCDQSCLDRLALRECEKYACDLTADSSTISTCGRAKDGKPCAEHANKARLTYAERLEALGCICRALIALGQESCCLPSRRPSTGSARRRRRRSKDLLLHQEATGLARKKNECRSSSDGTEAAAPEPPRIAGSCADSCCAEERPVGHVNEVKEFLSDVANATTDLEKAFARNEKEHVILSISGMTCTGCETKLVRTLGVHPAVRNLKTSLVLSRAEFDVIGAASVVDVMKHLERTTEFKCERVTNKGSSLDILAPDGDAAALINRPWPDGVTEVRLVDKKTVNVSFDPKIIGARDLVRHGWGDGQVNLAPPRPDLTLEAGSRHVRHVGYMTLLSACLTVPVLVMAWAPLPERDIAYDSASLALATIVQFVIAGPFYPKALKSFIFSRIIEMDLLIVLSTSTAYIFSLVSFGYLVSGRPLPTGEFFETSTLLVTLIMVGRWVAALARQKAVKSISVRSLQTPTALLVNDDGEETEIDARLLQYGDVFKVVPDSRIPTDGTVVSGSSEVDESMITGESRPVEKHARSPVIAGSVNGSGTLRVRVTRLPGDNTISTIAGMVDEAKLSKPKIQDLADRVASYFVPVVVALTIITLAVWIAIGVAVRQQPGKEATVRAITYAIAVLIVSCPCAIGLAVPMVIVIASGVAAERGVIFRSAESIEVAHRTSHVILDKTGTITEGKLSVAREWYAEGNQDTTKSLLLGLVGSIKHPVSAAVATHLKTQGVSPSLVSEPKTLTGRGVEGVVEGSGSLLRAGNSRWLNLDSDPEVQSVLSQGYTAFCFTIAGSVAAVFGLQDSIRPDAASTVKTLLERGISVHIISGDDDGAVRSVGAQLGIAETNLRSRCTPSDKQAYIKGLLGGTLSPNQTTKRKKPVVLFCGDGTNDAVALAQATIGVHMNEGGTDVANSAADVVLMRPKLAGILTILAVSEKSIRRIAFNFGWSFVYNLFAILLAAGAFVHARIPPELAGLGELVSVLPVIAAAVMLRWSKI

SEQ ID NO: 4110 - DNA, 639 bp, Myceliophthora thermophilia
atggaaccctcgatggacgtctcggcgctggacgtcgacgactatcttggagagacatatcacggagacgacagccgccagcacgaactagagcaccagcatagcaccacggtgcacggcgaggacgagccgtttgacgatacggatcggagcgaggataatcacgtctcgctggagaacgctgtgatcaagcacctcggtattgatctacaaggggcgcagacgttgcgaagaagcctaggacatctcgagcagagcgcggagccacatgccgacgagagtgacaagggaagggctcccgagcatcctgcggacggcaccggcaccggcaccgggaagggctcccgagcatcctgcggacggcaccggcaccggcaccggcacggccgccgcctcctcctcctcccccacacgcacccgcttctccccgctcaccagcccgacgaccaccgtcgcccctcctcctcctgctcctcctcttcctcttccacttctccatcctcacgaccgcctcgggagtgggaggaggagcgagagcgatggtcctccgccgcgtccgcattgaccacgctcgggcgcggaaggggagggcggacgggacggaggaggcggggcgatcgtgctgcgggacaactttga

SEQ ID NO: 4111 - protein, 212 aa, Myceliophthora thermophilia
MEPSMDVSALDVDDYLGETYHGDDSRQHELEHQHSTTVHGEDEPFDDTDRSEDNHVSLENAVIKHLGIDLQGAQTLRRSLGHLEQSAEPHADESDKGRAPEHPADGTGTGTGKGSRASCGRHRHRHRHGRRLLLLPHTHPLLPAHQPDDHRRPSSSCSSSSSSTSPSSRPPREWEEERERWSSAASALTTLGRGRGGRTGRRRRGDRAAGQL

SEQ ID NO: 4112 - DNA, 1116 bp, Myceliophthora thermophilia
atgggttcctccatgtcaatccctagctcagctagcatccgagaagaaaccaggcagaccgcggtcctatccgagtccggtctggttacccgacaataccgccgcgcagagattccagacgagcgcaatagcctccggctcagggtccgctttgggactgatgcaggcgccttggtcaatggcttccctagcaaaggcggcgtgtatagtcttttttgctctccgatggagctcgattttctcggcttggaccggtttgagaccgcgctaccatcatctgacccggctgaggaggatgcactctgtgctaagatacgactgctcggcgccgaatggtggccgagtttggattctctgtggggaggacctcctctactgaaggagaaggtgcgcttcattggagtcgcgtgcccactggaggagaaggtgcgcttcatcggagttgcatcccaaggggggttgtgggcactcgagacgaacttggaagactgttctaataggcaactgggaagaattcaaaacgccagggatatggaggagaagtgcaggcagattgagagattcggaggcaccttctatgctgatccgagcgagtgtcctcttctggacttcaaatccccagttcctgagagggcggccatacacgtcctgtttgccgacgacgatgccagcaaccagacagtcgcgcgcaatctcctgacacatcttggattctcccaagtcacaacggtccgggacggcaaggaagcgctcgacttccttttggcagctgctgaggacaagtcgcagagaaaacctgacatcatcttcttggacacggaaatgcccgtgatggacggcttcgaatgcgcccgcattctgagacgggagttcccttacaatacagattatagtaatatcccaatcgtcggcatggcgtaccgtaatccgatgctggagaacagggaaaggtggtttgcggcaggcatgagtggctttcttccactcccgattcaggaaagagatctggagcaaatgcttgttcgattggttctcagaggtcgatccagaatttcgctttccgggccaagtatcgaggatgcgggccgagatgcaagtatgatgcaggaagagtag

SEQ ID NO: 4113 - protein, 371 aa, Myceliophthora thermophilia
MGSSMSIPSSASIREETRQTAVLSESGLVTRQYRRAEIPDERNSLRLRVRFGTDAGALVNGFPSKGGVYSLFCSPMELDFLGLDRFETALPSSDPAEEDALCAKIRLLGAEWWPSLDSLWGGPPLLKEKVRFIGVACPLEEKVRFIGVASQGGLWALETNLEDCSNRQLGRIQNARDMEEKCRQIERFGGTFYADPSECPLLDFKSPVPERAAIHVLFADDDASNQTVARNLLTHLGFSQVTTVRDGKEALDFLLAAAEDKSQRKPDIIFLDTEMPVMDGFECARILRREFPYNTDYSNIPIVGMAYRNPMLENRERWFAAGMSGFLPLPIQERDLEQMLVRLVLRGRSRISLSGPSIEDAGRDASMMQEE

SEQ ID NO: 4114 - DNA, 1953 bp, Myceliophthora thermophilia
atgtcgccacccgattctgctagtgacgatgacgacttgccacaggttcgcagccggcgggtcgagaacctgaaggaacttcacgaggctgtcagtcagattcctcagcagagggcacggttaactcccaatggcgggagccccgaacaggatcgcgccgatgctggagacttgctagtcctaccctcccaagcaactgctctcgccgagggcatgcatcacagcttcagcaccgggtcgctcgacgagctcaagatgggtgataatcgtcggttcactcattcgaggtcggcgacggaaccacacgtctcgatcggcaggtccacgggcagctcgactaccggctcggacgaagaatctgatgaagggagccagcagaagccgcaaatggtgcggaagaagtctggtgaactcgtcagacccgccctgcgccccgcgtcccggcggcgaccgtcgagtatgccggggacgccaaccttctccaaggtagtgcactttgacgctcaccttgagcatgtcaggcacttcctccaggtcgacaggcctcttgctgtgagtgcaggttcctcgccggtcgacagttacgacagcgacaccgagtatccgttttcgagcgacggacgatcaacgacccgctccccaccttttgagtgggaaatcatcatgacaaacttccccgtcgacacgccggtgcgcaaggcacagatggtgcgtttggaaaaggtgtggctgtcgaccgatcagaagtcacttgtcggatcggtcgcggtggccaacttggccttccagaagttcgtcgcatgccgctttacgctcgactactggaagaccacatccgaagtcgctgccgagtacgtcggcgaagcagtccgtcctgtcgacaccgacacgccttacacccaggatcggtttaacttcagcatcaagctatctgacctggccaacctcgagaccaagacgctgtacttctgcatccgttatgtagtgaacgggcaggagtactgggacaacaacaacagcaccaacttccagatcgacttccggaagaagttccttccacagaacggaaagaagggtgccgctggcgcagcgactcgttccttcaacgggctccccaagagcaaccgtcgttcgggacagaagtccaagccatcgtcgtcagcgtcggatgagttcggtgactgccagaagctgaattttgacaagtcgatccacgactacctcggggaaacttcaggcccaacgggcttgaggctcaaggctgtgaagagcgccggcgatctccccagcgacaacccctccaagggattgttgggccctagcggccagtttgcttctcggtatgactttggcgactcgctgagcaaagctatccagaacgccaagggtgagatggctggaagatccgaaggactctacatgaagtccaggaagaaggctggttccccgacttccgcggagacaggggccgaaaaagagaaggcacaagcaccggatcccacagggccgtcaacaacaaccgctggagcaccaatcacgtcgcctgctgaatcgccgagtgccatcatctcatccgcctcgtacgaagaaatcgtcagcaagtggtgctttcagcaggacggcgagctacttggaagtccgctgggcaactactaccagcggtacagcagcacccggcaccagatgccacgcccacgggaccaaagcgcgtactttacgcacgttctcgttctaggcggcatgggacacgcgccggccgaaactcctctcggacagtcagcaagctcgccgtcaggcgagtccaccggtaccgcggctcagcagcagacagctgcgacggcctttgcccatctcgccggtacgccgccgaacgagtacccttatcaacgatcgcatgaccgcttccccttccacgggaccgagacttatgctccggcggcgattaggggttga

SEQ ID NO: 4115 - protein, 650 aa, Myceliophthora thermophilia
MSPPDSASDDDDLPQVRSRRVENLKELHEAVSQIPQQRARLTPNGGSPEQDRADAGDLLVLPSQATALAEGMHHSFSTGSLDELKMGDNRRFTHSRSATEPHVSIGRSTGSSTTGSDEESDEGSQQKPQMVRKKSGELVRPALRPASRRRPSSMPGTPTFSKVVHFDAHLEHVRHFLQVDRPLAVSAGSSPVDSYDSDTEYPFSSDGRSTTRSPPFEWEIIMTNFPVDTPVRKAQMVRLEKVWLSTDQKSLVGSVAVANLAFQKFVACRFTLDYWKTTSEVAAEYVGEAVRPVDTDTPYTQDRFNFSIKLSDLANLETKTLYFCIRYVVNGQEYWDNNNSTNFQIDFRKKFLPQNGKKGAAGAATRSFNGLPKSNRRSGQKSKPSSSASDEFGDCQKLNFDKSIHDYLGETSGPTGLRLKAVKSAGDLPSDNPSKGLLGPSGQFASRYDFGDSLSKAIQNAKGEMAGRSEGLYMKSRKKAGSPTSAETGAEKEKAQAPDPTGPSTTTAGAPITSPAESPSAIISSASYEEIVSKWCFQQDGELLGSPLGNYYQRYSSTRHQMPRPRDQSAYFTHVLVLGGMGHAPAETPLGQSASSPSGESTGTAAQQQTAATAFAHLAGTPPNEYPYQRSHDRFPFHGTETYAPAAIRG

SEQ ID NO: 4116 - DNA, 276 bp, Myceliophthora thermophilia
atgacggtaacagttcccaaatttcctagatattgtgtattccgttacagctacatccttggctcgccgttcaacagggacgacggcgtcaaccttcgaccacacagcgtctcgtcaccttacctcagcaaggcaggagccaacggctcaactctactttgtctgcccgccatctcatcacctttggtcccaatccccgcgttctgtttgaggctacaggcagcgcgacgcgaagaggaactcgccgaacaccagcattttcgcgatttccgctga

SEQ ID NO: 4117 - protein, 91 aa, Myceliophthora thermophilia
MTVTVPKFPRYCVFRYSYILGSPFNRDDGVNLRPHSVSSPYLSKAGANGSTLLCLPAISSPLVPIPAFCLRLQAARREEELAEHQHFRDFR

SEQ ID NO: 4118 - DNA, 3000 bp, Myceliophthora thermophilia
atgacctggcacgaggacgaggcaacgttaacacgaatgatgcaattcgcggacgagtgtatcgagacaaagacggtgacaaccacgaccacaacaaagcggtcctacccgccactctttctccgcgaaccacgagacgtactctcgctcgactccaaagaatatccacttgccgcaaaaccgactccgcccgagctgcgaaagtttacctttgatcttgatgactacgagacccgcagctggaagaacgagatttcagatcctcagagcatcgattacactggcgaaatcaagcgcgagcctggtgttgacagtccaatttctacaacgtcgcatcgtctcaatgaacagctggaggcataccaaggaaggtcgagaagatcaacgaggggcgtttcgcctaatcagacaccgatgcccacgagaagctcacgggcggcaacgaagcctccgagcataccacatacggcttccgataaactgcgtcatgccgtgtctcgtggctatagtcgggatgcggcgagggtactccgtcgctcgtcaggttacttggcaactcctagtacctctgagcttgccaccggtcgcttagagcgagctgcgaggctgaggtccttcccagcggatgtggcggactcgggaactagccagtccacctctgtttatgatgttgatagccttgcagacagcgagtcgcaaacgttcagcaacgtcgctacccctcccatcacggacccggagcttccgccattcgatgacgcagacgattctctcccgccccatgccagcgaccctcccccgaggagaagccttagcacggtggctgcccaggacgttagcttgcctagtcccaggctttcgcctacgttggcagccactcaagtgcagcctacccaagccgacgacgaagccgaggaggccgaagagacctcattctcgacacaactcacgcgttcagaccggcaacaatggatggacgaaagccaggcgacggatgataccgaggttccaggagcaatggatctatctccagccccatacggagcctctctttctcggtctaggtcataccggagacctcacctcgacccaggttcgatgctggatagctttgacgccatgcctaacgagctcaaaacctggatgatgtaccagttcctgcgcaggtgtccccgcaaaaccttgcacgttgtagcggatgtggtcaacccagccctcaagtgcgattttctcaagcaactgccactcgagctcagcctccatgtcctctcttatttggaccaccgagatctttgccgtgcagcacaggtgtctaagcattggagacacattatcgacagcaacgagaccgggtggaaggagttgtttgaccgcgatggcttccgtttgccaccaggggaactccagagagctatcaatgagggttggggatggcaggaccccgtcgggttcgagggatgcgaggttgacctgagcaaccaaagccggcttacattcagcgagcatgagctcatccggtcggctgccaaggcggacgtacccgagatcctaccacgaacgaggagcgcaaagcggaagcgtgggtcaacccagatcaacgccgagagggccaaacgccgggtcagcgcccaggaggggaaggcggatagaaacatgcctccggccaagacccacaaatccgaaggcccaatctcggctgcgaacgctgcggctattgctgttcccgacccgcagcttggcctcccgagtctgcgaaaccttcaccttttcaagtcgctttatcggagacattatatgttccggcggagctggatgagcgggaaagtgaagccaggtcatgttgcttttgctgctcacccacgccatgtcatcacctgcctccagtttgacgacgacaaaatcatcacgggaagtgacgataccttgatacatgtctacgacaccaagacaggaaagttacgtacgaagctcgagggccacgagggcggcgtctgggcgctccagtacgaggggaatacgctggtgtctggtagcacagaccgttccgttcgcgtgtgggatatccagaaaggtatctgcacccagacgttttacggacacaccagcacggttcgctgcttgcagattgtgatgccggttgacaccggcaaagtccaggacggtaagcccgtcatgatgcctcctaagccgctcatcatcacgggctcccgggacagccagcttcgcgtctggcgattgccagaggcaggttctcgtcgatacattcagactggtccgcctgccagtgatgaccaatgcccttacttcattcgtattctatccggccatgctcactcggttcgcgccatttccgcatatggcgacacacttgtttccggcagttacgacagcacagtacgcgtctggcgtatcagcactggcgagcagttgcatgttctgcacggccacgtccagaaggtttactcggtcgtgcttgaccataagcggaaccggtgcatttcgggatccatggactcgctggtcaagatctgggatcttaacacgggagcatgtctgcacacgctcgaaggccacagcatgctggtcggcttgttggacctgcgggatgaccagctggtctctgccgctgccgacagcacgttacggatttgggatcctgacacgggcaagtgcaagaaagttcttgaagcccacactggagccataacttgtttccagcacgacggacgaaaggtgatttcgggcagtgataagacggtcaagatgtgggacgtcgctacgggcgattgtgtccaggacctcctgaccgacttggctggcgtgtggcaggtcaagttcgacgatcgccggtgtgtggctgctgtgcagcgcgatggtctcacatatgttgagatcctcgactttggtgctgtccgtgatggcaagccacccgaggagctgggcaagcggaaactattgaacgaggccgaggtccagcgactaattgcagaggagtcctga

SEQ ID NO: 4119 - protein, 999 aa, Myceliophthora thermophilia
MTWHEDEATLTRMMQFADECIETKTVTTTTTTKRSYPPLFLREPRDVLSLDSKEYPLAAKPTPPELRKFTFDLDDYETRSWKNEISDPQSIDYTGEIKREPGVDSPISTTSHRLNEQLEAYQGRSRRSTRGVSPNQTPMPTRSSRAATKPPSIPHTASDKLRHAVSRGYSRDAARVLRRSSGYLATPSTSELATGRLERAARLRSFPADVADSGTSQSTSVYDVDSLADSESQTFSNVATPPITDPELPPFDDADDSLPPHASDPPPRRSLSTVAAQDVSLPSPRLSPTLAATQVQPTQADDEAEEAEETSFSTQLTRSDRQQWMDESQATDDTEVPGAMDLSPAPYGASLSRSRSYRRPHLDPGSMLDSFDAMPNELKTWMMYQFLRRCPRKTLHVVADVVNPALKCDFLKQLPLELSLHVLSYLDHRDLCRAAQVSKHWRHIIDSNETGWKELFDRDGFRLPPGELQRAINEGWGWQDPVGFEGCEVDLSNQSRLTFSEHELIRSAAKADVPEILPRTRSAKRKRGSTQINAERAKRRVSAQEGKADRNMPPAKTHKSEGPISAANAAAIAVPDPQLGLPSLRNLHLFKSLYRRHYMFRRSWMSGKVKPGHVAFAAHPRHVITCLQFDDDKIITGSDDTLIHVYDTKTGKLRTKLEGHEGGVWALQYEGNTLVSGSTDRSVRVWDIQKGICTQTFYGHTSTVRCLQIVMPVDTGKVQDGKPVMMPPKPLIITGSRDSQLRVWRLPEAGSRRYIQTGPPASDDQCPYFIRILSGHAHSVRAISAYGDTLVSGSYDSTVRVWRISTGEQLHVLHGHVQKVYSVVLDHKRNRCISGSMDSLVKIWDLNTGACLHTLEGHSMLVGLLDLRDDQLVSAAADSTLRIWDPDTGKCKKVLEAHTGAITCFQHDGRKVISGSDKTVKMWDVATGDCVQDLLTDLAGVWQVKFDDRRCVAAVQRDGLTYVEILDFGAVRDGKPPEELGKRKLLNEAEVQRLIAEES

SEQ ID NO: 4120 - DNA, 960 bp, Myceliophthora thermophilia
atggtacctccaaggcccacctcgggcgtagtagacccgagcggcggcatcgtggggtccttctcgagattctggcagagaacctatgcctccgaccatatcggtttcgtacttctgctggtcgggtacttgctgcttcaattcttcgtcgagcccttccatcgcatgttttcgctcaacgacctacgcatcgcctttccccatgccgaggtcgaacgcgttccgctcctcaatgacttcatctacgctctcttcctccccctgggcgtcctcattctcgccaacctcgccactcacgcgccgccacacaagcaccacgtcacggtcctcggcctggccatctccctgatcctggcctccttcctcaccgacgtcatcaagaacgccgtcggccgcccgcggccggacctgctcgcgcggtgcgtgccgcggccggacacgccgcgcgacgtgctcgtcacgatcgacgtgtgcacccagacggaccatcacaccctgcacgacggctggcgctcgttcccctcgggccacagctccttcgccttcgccgggctggggtacctgagcctgttcctggcggggcagatgcgcatctttgcgcacggcggcggcggcggcggcggcggcggcgcgagcgctggggacaaggtcgagaagctggtcaggggcgacctgttacgcgcgcttctgtgtggcgcccccctcttgggggccaccatgatcgctatcagtcggtgccaagactaccggcacgatgtgtacgatgtgtgcgtcggtgggttactgggctggacggtagcgtattggagttataggcggtattggccgagattggggagctggcggtgtgaggagccgtatgcaggaccgctgggagcgcaggatgttgttgggaggaatgggtatgggagggtgagggacgaggaagagggtctgggccagggcagaaatatcgattga

SEQ ID NO: 4121 - protein, 319 aa, Myceliophthora thermophilia
MVPPRPTSGVVDPSGGIVGSFSRFWQRTYASDHIGFVLLLVGYLLLQFFVEPFHRMFSLNDLRIAFPHAEVERVPLLNDFIYALFLPLGVLILANLATHAPPHKHHVTVLGLAISLILASFLTDVIKNAVGRPRPDLLARCVPRPDTPRDVLVTIDVCTQTDHHTLHDGWRSFPSGHSSFAFAGLGYLSLFLAGQMRIFAHGGGGGGGGGASAGDKVEKLVRGDLLRALLCGAPLLGATMIAISRCQDYRHDVYDVCVGGLLGWTVAYWSYRRYWPRLGSWRCEEPYAGPLGAQDVVGRNGYGRVRDEEEGLGQGRNID

SEQ ID NO: 4122 - DNA, 951 bp, Myceliophthora thermophilia
atgcaaccgagcaacggcgcggcaccaccgccctctggcggcccccccgacgcaaatgcggccgcgagacaattcgcccagactatctccgaagaggatctcttccagcgggcgcagacgctctttgccccattcattgcttacccgcctaaccgccctatggttttcgtcaagtttggtggccccgagaagcaggccgagggagacatgcagatgctcgcgttcaactggctgcgccaagaacgccagaggaaccccagctgtaatatccacgttcccgaggtctttaagatattcagcagaggcggtttaaccttcattatcatgcaacttgtcgcagcaaccccggtccagcagtttgcgacaaaattcgaccctcgtacttgggaccataacaagtctcgctactacgatataattgctgagggagtccgtttgctaagctgtatgcctgtcccaaccggcgcaactccaggcccatacacgcgcggtgaacgccgcatcaaacacttgctcttcaaagaccacacagccccagttgtgtaccctaccattcaggatttacaagaccacttaaatagggttgcagaacgcggataccgtaataaccctcacccgccaaagatcgctcttgagaaagaactcgttttttgctataccgatttcaatgacgagaacttcatgttcactaccgaccccgatggccgtcctcgtctctacattgttgactttgaacatgcctcgtttttgccgcttagcttcctcgcctacgctgtattggaacccgactcccgctggtttttgtgtagttggatagcgaagaagtttggcgcctctcttccgcggaataatattgcggttatgcagagattatgttacatgtttcaagtgagttcagcaaatattggacttaggaagaaacaactagcgccagacaccttagaccaatag

SEQ ID NO: 4123 - protein, 316 aa, Myceliophthora thermophilia
MQPSNGAAPPPSGGPPDANAAARQFAQTISEEDLFQRAQTLFAPFIAYPPNRPMVFVKFGGPEKQAEGDMQMLAFNWLRQERQRNPSCNIHVPEVFKIFSRGGLTFIIMQLVAATPVQQFATKFDPRTWDHNKSRYYDIIAEGVRLLSCMPVPTGATPGPYTRGERRIKHLLFKDHTAPVVYPTIQDLQDHLNRVAERGYRNNPHPPKIALEKELVFCYTDFNDENFMFTTDPDGRPRLYIVDFEHASFLPLSFLAYAVLEPDSRWFLCSWIAKKFGASLPRNNIAVMQRLCYMFQVSSANIGLRKKQLAPDTLDQ

SEQ ID NO: 4124 - DNA, 303 bp, Myceliophthora thermophilia
atgacaggaagaaagctaacaaggagagcctacttgcgttatttcaaagttcttggtcttaagcagattgctcaggattatccccctctcggctccgataagagctctagcggcggcttagatgaggactccggtgacgagtctggtgacggctccggtgacggctccggtgacggcataaacgaggactctagcgacggctttggtgacggccctagtcccggcttaggttcggactcgacttctgcgatgacgagactacaaaggctatacagagaaggcaagggaggctggtatctctga

SEQ ID NO: 4125 - protein, 100 aa, Myceliophthora thermophilia
MTGRKLTRRAYLRYFKVLGLKQIAQDYPPLGSDKSSSGGLDEDSGDESGDGSGDGSGDGINEDSSDGFGDGPSPGLGSDSTSAMTRLQRLYREGKGGWYL

SEQ ID NO: 4126 - DNA, 987 bp, Myceliophthora thermophilia
atgccctcatatgatcccgcggaaaacgtcacgaacaaagacttcaatgtttacgacgcgcgcgatgtgccgagagcaacttcccaacgctttaaaaatctgcatcaagctctggacaagcaaattgtacacttcacggtcgaattcctctacaccaaccccgtcaagccccatgtcgtgttcaagcttaacttccgctctccgataggcccaaacaaccgattctcctctgcgcgcgtttccatggagctaggcgaaggcgagaaggatggcgagcagggccccggagcctgccagatcaagctctgtagctacaggggccggacggagcgcgcaagcgctggcttccagttcgagctccggcgttcgatcacccttgccaacatgatccaattgatcaatggcacgtatgatgggctggataacaccatgaaaaccgacatgaagcctttcgactttgtggatatcaacggttactttgacggatgccgcgactggatcgctcaagtctttgtccgggcgcatgccgcaggcgtggtgggctgggccattgtgggcattcttggtcccagcgggcaacaaatgcaacgcgagagcctgcgtccagagcagggggcacgagtaactcctatcaactggcataatgcaggcttccatgacgttattggcaagttctttgggcggccagtgccgaccgggtcggccacttcagttgtctactaccgcgatctcccggtcgagaaaggtaagttctgggcacggggcttctcgcgttatgtcaccgaccggcatcagcgttatacactgccgtacagagtgccccagcctaacaccggcgcgcctggcaacactgccgggcgtggcggtggtgctgctggcgctggacgcggtagtgctgctggtgctggacgcggtggtgctgctggcgctggccgtggtggcgctgctcctcctgctggacgcggtggtcttccgcgacgcaggtga

SEQ ID NO: 4127 - protein, 328 aa, Myceliophthora thermophilia
MPSYDPAENVTNKDFNVYDARDVPRATSQRFKNLHQALDKQIVHFTVEFLYTNPVKPHVVFKLNFRSPIGPNNRFSSARVSMELGEGEKDGEQGPGACQIKLCSYRGRTERASAGFQFELRRSITLANMIQLINGTYDGLDNTMKTDMKPFDFVDINGYFDGCRDWIAQVFVRAHAAGVVGWAIVGILGPSGQQMQRESLRPEQGARVTPINWHNAGFHDVIGKFFGRPVPTGSATSVVYYRDLPVEKGKFWARGFSRYVTDRHQRYTLPYRVPQPNTGAPGNTAGRGGGAAGAGRGSAAGAGRGGAAGAGRGGAAPPAGRGGLPRRR

SEQ ID NO: 4128 - DNA, 477 bp, Myceliophthora thermophilia
atggatcacacccgcgacccctgcccctgggtcattctcaatgacttcggcggtgctttctgcatgggtgctgttggaggcacgatctggcatggtgttaaagggttcaggaacagcccgtatggcgaacggaggctaggcgccatcacagcgatcaagatgcgcgccccagttttgggaggcaatttcggcgtttggggtggtttgttcagcacgttcgactgcgcagtcaagggcatcaggaaaaaggaagatgcgtacaatgcgattgcaagtagccccattgccgggttcttcacgggcggctcgttggctatccgaggcggatacaaggcggcgaggaacggtgccattagttgtgcgatcctacttgccgtcatcgagggcgtcggtattggattccagaagatgtttgcgggtgccacaaagctggaggcgccgcaaccacttccttcgggcgagaagatgctcgcgtag

SEQ ID NO: 4129 - protein, 158 aa, Myceliophthora thermophilia
MDHTRDPCPWVILNDFGGAFCMGAVGGTIWHGVKGFRNSPYGERRLGAITAIKMRAPVLGGNFGVWGGLFSTFDCAVKGIRKKEDAYNAIASSPIAGFFTGGSLAIRGGYKAARNGAISCAILLAVIEGVGIGFQKMFAGATKLEAPQPLPSGEKMLA

SEQ ID NO: 4130 - DNA, 1599 bp, Myceliophthora thermophilia
atgcagtctttccttcagcaccgccgccttcggctggcggccgagcgagatgttgcgaggctgagcaagccccagagcggctcgcccgcaccaacagacaacggcaagaatgagtcttcatccctcgaggcagggagagaggcgaacggcaagccgaacctgatacccggcgtcgagctctccgaagatggcaccgtgtaccaggtcggctgggccgacggcgaccccgaaaatccgcagaactggggtgcggccaagaagtggtgggcgacggcggcggtgtgtctgattgccattgccgtcagcatcccgtcctcgatcgatgccccggtcgccccccagttcaacgaggaatatggcgtcgggcccattgctgggtctctgactacaggcatgtacctgattggtatcggggtcgggtccatgtttgccgcgcccttctcggagacgtttggacgcaactgggtttacttcagcaccctgaccgtcttcatcctcttctgcgtcggcaaggcactcgcgcccaactatggcgccgccatcgtgttccgcttcctggtcggcttcttcggcgccgcgccgctcacggtcggtggcggcaccgtcgccgacatctggggtccgctcgagatcaccttcagcctcccgttcgtgaccatgacgtcgtacgccggccccatcctggggcccatcatcggtgcctatctccccaacatcggcttccggtgggccgactggatctccatcatcatcgccggcgccgtcatggccatcatcttcttcctccagcccgagaccttcggcccgaccctgctcgagtggcgggcggaccacctgcgcacgctcaccggcgattcgcgctaccaggtcccgggccacgcctcggccgggtcgctgggccggcgcctgctcaccaactgcctgcggcccttcgccatgacgtacacggagcccatcatcctggtcttctccttctacctgatcatcctctacatcgtgctcttcaccttcctgaacggcttcccgtacatcttcgcccagacgtacggcatctccgagtcgctcaccttcatcatctggaccgccctgctcgccggcgacgtcgtggccatcccgctgatccccatcgtctacggctggaccaagaaggcggcggccagggctgccgaggcgggccagcccctggcgcccgaggtgtgcctctacttcgccatgctgggcggctccgtcctcatgcccgtctcgctcttctggatcggctggacgtgctacccgagcatcagcatctggtcccccatcgtcggcgtcttcgtcttcggctactcgctcgtcaccatcttcaccaccacctacatctacatcgtcttcgtctacctgcagtacgccggctccgccctctccttcatgaccttcagccgctacgtcatctcgggcgctctcctgcccgcctcggtgcccatgtacgagaacctcgggccgcacttgaccctcacctggatcggtgccgtcgcggccgtcatggcgcccctgcccttcgtgctgtaccgctacggccacaaggttcgggcgatgagcaagaacgtgcagaacaaggcgtga

SEQ ID NO: 4131 - protein, 532 aa, Myceliophthora thermophilia
MQSFLQHRRLRLAAERDVARLSKPQSGSPAPTDNGKNESSSLEAGREANGKPNLIPGVELSEDGTVYQVGWADGDPENPQNWGAAKKWWATAAVCLIAIAVSIPSSIDAPVAPQFNEEYGVGPIAGSLTTGMYLIGIGVGSMFAAPFSETFGRNWVYFSTLTVFILFCVGKALAPNYGAAIVFRFLVGFFGAAPLTVGGGTVADIWGPLEITFSLPFVTMTSYAGPILGPIIGAYLPNIGFRWADWISIIIAGAVMAIIFFLQPETFGPTLLEWRADHLRTLTGDSRYQVPGHASAGSLGRRLLTNCLRPFAMTYTEPIILVFSFYLIILYIVLFTFLNGFPYIFAQTYGISESLTFIIWTALLAGDVVAIPLIPIVYGWTKKAAARAAEAGQPLAPEVCLYFAMLGGSVLMPVSLFWIGWTCYPSISIWSPIVGVFVFGYSLVTIFTTTYIYIVFVYLQYAGSALSFMTFSRYVISGALLPASVPMYENLGPHLTLTWIGAVAAVMAPLPFVLYRYGHKVRAMSKNVQNKA

SEQ ID NO: 4132 - DNA, 6870 bp, Myceliophthora thermophilia
atgactgccgaccacaaccttcccaacggctctgcctctcacaccaccgcaaatggcattaacggtcacgccgcagggcgccctcggccgcgggagcccatcgccatcatcggcatgagcgccaagtttggagggtctgccagcagtccttccaagctttgggacatggttagggatgggaagagcgcatggtcgccaatcccgaaagatcggttcgatgtcgactctttctaccacccggacaaagacaggccgggcaggaaccatgctaggggagggtacttctttcccggggatatcggactcttcgacgcaggcttcttcaatctgtcggcggatgcggccggtgccatggatcctcagcttcgcctgctgatggaatccgtgtacgaagcgtgggaagatgcctgcattcccctcgacaaggtcgccggttccgagacttcggtctacacgggcgtgtacggcaaggattaccacgagctgcagactcgggatcccgaagtgctcccggcggcgttcctgacgggaaacggcatggccatgatgtcgaaccggatctcgcacttcttcgacctgcagggcgcgagcatgaccatcgacaccggctgctcttcgggactcgtggcgctgcaccaagcctgccacagcctcttggccggagagtcggacatggccgtcgtcggcggcaccggcgtcatcctgaacccggatatgtacattgccatgtcgaccctgggcatggtcggcgcggacggcaagtgctacgcctgggacgcccgagcgcagggatacggccggggagagggtgttgccgccctgatcctgaagcccctgcgggcggcgttgcgggacggcgaccaggtgtacggcgtcatccgcgagacgggcctgaaccaggacggcctgaccaagaccatcacgtcgccgtcggtcgagtcccagatcaagctgatcgaaaagtgctacggccgcgccggcctcgacctggccgacaccggctacgtagaggcacacatgacgggcacgcgcgccggcgatctggccgaggcgaccgcgctggccaggacctttggccgagctcgcaagcccggggaccccgtgtacgtgggatcggtcaagaccaacgtcgggcataccgaggccgtcagcggtctggcggccatcatcaagaccctcttcgccctgaagcaccgggtgatcccgcccaacatcaactaccagacgcccaatcccgagatccccctggaggagtggaacctggcggtgccgacctcgctcgtcccctggccggcggacaaggcgctccgtgcttcggtcaacaacttcggctacggcggcgccaacgcccacgtcatcctcgaggcgccacccggagagtacgaggagaagcggcgtgccagagcaccaaaagggccggccgagtcggagcagagcaggatcttcctggtgagcggcaaggaccaggtggccaccagcgggctgatggccaaccttgccgcctacgtccgggagctgccggacgacagcacgctcggcgggatcgcgcggacgctggacgagggccggacccggttccgctggctcgcggccgtgcgggcgcgcacccgggcggagctggccgagcgcctctcgcagccgtcgacgaagccgaagccgcagccggcgcacgtcacgagcggcaagcggccccggctcgggttcgtcctcaacggacagggcgcgcagtggcacgccatgggtcgcgagctgatcgcggcctaccccgtcttcggcgacgcggtccggcgcgccgacgccgtgctccggggccgctacggcgccgactggtccctgctcgaggagctgaaccgggacgcgaagacgacccgggtcggcgagatggccctgagccagcccgtcaccatcgcgctccagctctgcctgctcgacctgctcgcctcgtgggacgtccggccgtccgccttcagcagccactcgagcggcgagatcgcggccgcgtacgccgccggcgtgctcaccttcgaggaggccctgggggcgggctactaccgcggccagatcccgtcgcgcagcaaggagctctcggccgtccgcggaggcatgctggccgccggcgtcagccgggaagacgcggccaggttcatcgccgacaccaggagcggccgggtcgtggtcgcctgcgtcaactcgcccgagagcgtcaccatctcgggcgacatcgaggccatcgacgaggtcgaggcccgcctcagggcggaggagctcttcgccaggaagctcaaggtgccgctcgcgtaccactcgcaccacatgcgcctcctggcggacgagtacacggcccggctcgtcgagacggtcaggagccggccggacgaggggtggacgaggcggtaccggtacgcgtcgcccgtgacgggcgacatcgtcaccgactcggaggcgctcgggcccgagtactttgtccgcaacctgaccagcccggtcctgttcagcgaggcgttcgacaagatgtgcttcggcgaggacgggacggtccaggtcgacgtggtcgtcgagatcggagcgcacggcacgctcgccgggccgatccggcagatcctcaagagacgcggaacgaccgagctcccgtacgtgtcgacgctctcgcgcaacgtcgacgccgtcgagacgatgcagaacctggccgtcggcctcctggagcagggctacccggtcgacctgtcggccgttaacgaccccctgggcgccgagccggccctcgtgtacgacctgcccaagtacgcgtggaaccacacgacgcgctactggaccgagtcgcgcgtcaaccgcgagatccggtccaggaagcacaaaccccacgagctcctggggagcctgctccccggcgacaacgggctggcgccgacgtggcgcaacttcctccgccagaacggctcctcgtggctggtggaccaccagatccagggctacgtcgtcctcccgggcgccggctacgtcgccatggccgtggaggcggtcaggcagcacctcggcgccggcgccggcggcccggggtcggtgggagacaacgacgacgacgacggcatcacgggcttccggctccgcgacatcgaggtcctcaacgccctgaccatcccggactcgagcgcgggcgtcgaggtccagttcaacctgcggccgaccgagaaggacgactggtacgagttccgggtctcgtccctgaccctctccaacacctggaccgtcaactgcacgggcttcatccgggccgataccgaggagtactccccactgccgaccgtcagcccggacagcttcttccacccgggcgccaggcgggccgacgtcgagccggagtccctgtgggcggacctgcgcaggatgagcatgtaccacggccccgtgttccggccgatcaacagcatcaagacggcgcgcgacaaggcgctgacgtccatcacgctcaagccggtcgtcgaggaggcgcacgactacgtgatccacccgaccacgctcgacggcatcttcatcgccgcctacaacggcctgccgcgcaagatccgcgacgccttcaccgtcgggcggccaggacatcgactgcttctcgcagtcacagcgccgacccaggggttcgacgccaccatcgccgtcaccaacaccaacggcggcaacggaagcggcacgggcggtcgcgtttcgctgcttgtcgaccacttctacgcccaggccatcccccgcgaggggggcgacgactcggacgcccagcagcagcagcccggcatcatctcgaaactgcagtgggagcccgacctcacgttccccgtcgtcccggccaggccggccacctccgcgcagcaacaacaacaacaacaacaacaacaacaacccctggtcttccggccggacgacaagcaggccgactttgagcgcaaggcgccgcgcgtggccttccacctcatccacgacgccgtgcgggagatcgagaagacacccgaccgcctgagccccaagtaccgggacctgttcgggtggatgaagggcgtcgtggcgacggcggccaggggcgagctcggcccgcggagcgacacctgggcgcgcaccagcagcggaaccaagcagctgctgatcgacgacctcaacgccaagcccgtccccgccggcaggctcctggtccgcgtaggcgagaagctgccccggatcctccgcggcgaggtcgacgaccgggccgtcgccgagctcgtcaacgccgacaacctgctgagccggtactacgtcggccacccgacgctcgagggcacgacgctcaagcagatcgccagggtcgccgagcagctggccatcgaccgccccggcgccaccgtgctcgagatcggcgccggctccggcgtcgtctccaaggccgtgctcgaggcgttcggagcccgccacggcgcggacggcgcgaggtcggtgctcgggcactacgacttcaccgacaacagcaacaacaacagcaataataacaacaacaacaacaacaacaacagcggcagcagctcgcagcagcagcagctcttcttcgacgaggcggctaagaagctcgccccctggagcgacctcctgaccttcaaggagctcgacatcggggcggaccccgaggagcaagggttcgccgcggccagctacgacctcgtcgtggcctcgcaggccctccacgacaaggcggtccgccgcgacgccctccgcaacgtcaacaagctgctcaagccgggcggcaccctcctcctggtcgagacgacgcgggacccggtcgagcgcgagctcgtcttccgcgtcctgcccggcggcaagagcccgaccctctcggcgcgggagtgggaagagatcttgcgcgagaccggcttcaccgccccgcggttcccggttggtggcgccgacgactccgacgacgcttccatcagcattatcctggccagcaagggggccgccgccccgtcgtacccgtcctccgtctccatcgtgtacgccggccgggcgcctcctcccgagtcgtggacggagcagctgagcgaggcgatccgggccaggaccggcgggtcgtcggttgttgcggtcgagaacctggacgagctcgaggtctcgccggagacggcgtacatcttcacgcccgagctgcgggcgcccttcacggcccggctggacgaggcctcgttcgagaagctgaaggccttcctgctcgacgcccagctgatcctctggctcagcagcggcggcctcgtggacgccgacgagccgctggtcggcgccaccaacggcctgctgcgcgtgctgcggcaggaggacgccggcaagcggatcgcccacctcgactttgaccttccgcggaccgccgacgccaacggcgacgacaaccccaacccctggacggccgacaagatcgactacatcgtcgaggtgttcgagcggaccttcgagaagggcttcgcgtctgcctatcccgaccacgactgggagtactcggtcaagaaggactcgggcgtgttcgtgccgagagcctatcccgtcctgcaagctcgggatacctccgatctcccccccctgaatctgaaccgcgacgacgcgacctatctcgtcatcggcggcatgggcggcatcggccagcacatcgccgcctggatgatggagaagggggccaggaacgtgctgatcgtctcgcgcggcgccgaggcgagcccggacgtgccctccatgaaggccatggcggaggcggacgggtgcaagctggcgatccggtcgtgcgacgtgaccgacgcgcgcgccttcgccgacctcctcgcgtgggccgcctcctcctccgccggcggcggcggcctgcccccgatccggggcgtcgtcaacgcggccatggtgctgcggaactcggtcctcgaccacatgtcgtacgccctctggcggtccggcatccgcgtcaaggtcgacggcagctccaacgcccacgccctgctgctgccgccgcccgacctcgacttcttcgtccagctgtcctccgccgtcggcgtccccggccacccgtcccaggcccactacgcggccgggaacacgttccaggacgccctggcccgccaccgcgccgtccgcggcctgcccgccgtcaccctcgacctgaccgccatcgagggcgtcgggtggatggcccagcagggcgacgaggaggcccagcaggaggtcgtgcggcgcatccggaaggtcggcctgtcgcccgcgggcatcgacctggtcatggacctggtcgaggccgccatccgcgacccgttgcgcgccaccgccgccgactgccacgtcgtcgtcggcctgtcgacctacgcgagcatccccgacgggtccgtgaccaaggcggaccggcggttcggcacgctgcggctggcgacgaagcgggcggtggcgggggcggacgacgacgccgcagggggggctgcggcgtcggggtcgggcggcggcggcaaggacggcgtcgcggagctgcttagggcggccgcggacggcagcatcagcagggccgaggcggcgcccctggtcgtcgacgccgtcgccgccaggacggccgccatcttcaacctcggccgtgacgagatcgacggcggccgccccctgtccggctacggcgtcgactcgctcgtcgccgtcgagtgcgcaacgccccctgtccggctacggcgtcgactcgctcgtcgccgtcgagttgcgcaactggctcgtcggctgcctcaaggccaaggtctccatcttcgacatcctccagtcgccctcgctcgacgactttggcgccctcctggtcgagaagagcgagttgctcaaggggttggcttaggacgctgtgagagtgcttga

SEQ ID NO: 4133 - protein, 2289 aa, Myceliophthora thermophilia
MTADHNLPNGSASHTTANGINGHAAGRPRPREPIAIIGMSAKFGGSASSPSKLWDMVRDGKSAWSPIPKDRFDVDSFYHPDKDRPGRNHARGGYFFPGDIGLFDAGFFNLSADAAGAMDPQLRLLMESVYEAWEDACIPLDKVAGSETSVYTGVYGKDYHELQTRDPEVLPAAFLTGNGMAMMSNRISHFFDLQGASMTIDTGCSSGLVALHQACHSLLAGESDMAVVGGTGVILNPDMYIAMSTLGMVGADGKCYAWDARAQGYGRGEGVAALILKPLRAALRDGDQVYGVIRETGLNQDGLTKTITSPSVESQIKLIEKCYGRAGLDLADTGYVEAHMTGTRAGDLAEATALARTFGRARKPGDPVYVGSVKTNVGHTEAVSGLAAIIKTLFALKHRVIPPNINYQTPNPEIPLEEWNLAVPTSLVPWPADKALRASVNNFGYGGANAHVILEAPPGEYEEKRRARAPKGPAESEQSRIFLVSGKDQVATSGLMANLAAYVRELPDDSTLGGIARTLDEGRTRFRWLAAVRARTRAELAERLSQPSTKPKPQPAHVTSGKRPRLGFVLNGQGAQWHAMGRELIAAYPVFGDAVRRADAVLRGRYGADWSLLEELNRDAKTTRVGEMALSQPVTIALQLCLLDLLASWDVRPSAFSSHSSGEIAAAYAAGVLTFEEALGAGYYRGQIPSRSKELSAVRGGMLAAGVSREDAARFIADTRSGRVVVACVNSPESVTISGDIEAIDEVEARLRAEELFARKLKVPLAYHSHHMRLLADEYTARLVETVRSRPDEGWTRRYRYASPVTGDIVTDSEALGPEYFVRNLTSPVLFSEAFDKMCFGEDGTVQVDVVVEIGAHGTLAGPIRQILKRRGTTELPYVSTLSRNVDAVETMQNLAVGLLEQGYPVDLSAVNDPLGAEPALVYDLPKYAWNHTTRYWTESRVNREIRSRKHKPHELLGSLLPGDNGLAPTWRNFLRQNGSSWLVDHQIQGYVVLPGAGYVAMAVEAVRQHLGAGAGGPGSVGDNDDDDGITGFRLRDIEVLNALTIPDSSAGVEVQFNLRPTEKDDWYEFRVSSLTLSNTWTVNCTGFIRADTEEYSPLPTVSPDSFFHPGARRADVEPESLWADLRRMSMYHGPVFRPINSIKTARDKALTSITLKPVVEEAHDYVIHPTTLDGIFIAAYNGLPRKIRDAFTVGRPGHRLLLAVTAPTQGFDATIAVTNTNGGNGSGTGGRVSLLVDHFYAQAIPREGGDDSDAQQQQPGIISKLQWEPDLTFPVVPARPATSAQQQQQQQQQQQPLVFRPDDKQADFERKAPRVAFHLIHDAVREIEKTPDRLSPKYRDLFGWMKGVVATAARGELGPRSDTWARTSSGTKQLLIDDLNAKPVPAGRLLVRVGEKLPRILRGEVDDRAVAELVNADNLLSRYYVGHPTLEGTTLKQIARVAEQLAIDRPGATVLEIGAGSGVVSKAVLEAFGARHGADGARSVLGHYDFTDNSNNNSNNNNNNNNNNSGSSSQQQQLFFDEAAKKLAPWSDLLTFKELDIGADPEEQGFAAASYDLVVASQALHDKAVRRDALRNVNKLLKPGGTLLLVETTRDPVERELVFRVLPGGKSPTLSAREWEEILRETGFTAPRFPVGGADDSDDASISIILASKGAAAPSYPSSVSIVYAGRAPPPESWTEQLSEAIRARTGGSSVVAVENLDELEVSPETAYIFTPELRAPFTARLDEASFEKLKAFLLDAQLILWLSSGGLVDADEPLVGATNGLLRVLRQEDAGKRIAHLDFDLPRTADANGDDNPNPWTADKIDYIVEVFERTFEKGFASAYPDHDWEYSVKKDSGVFVPRAYPVLQARDTSDLPPLNLNRDDATYLVIGGMGGIGQHIAAWMMEKGARNVLIVSRGAEASPDVPSMKAMAEADGCKLAIRSCDVTDARAFADLLAWAASSSAGGGGLPPIRGVVNAAMVLRNSVLDHMSYALWRSGIRVKVDGSSNAHALLLPPPDLDFFVQLSSAVGVPGHPSQAHYAAGNTFQDALARHRAVRGLPAVTLDLTAIEGVGWMAQQGDEEAQQEVVRRIRKVGLSPAGIDLVMDLVEAAIRDPLRATAADCHVVVGLSTYASIPDGSVTKADRRFGTLRLATKRAVAGADDDAAGGAAASGSGGGGKDGVAELLRAAADGSISRAEAAPLVVDAVAARTAAIFNLGRDEIDGGRPLSGYGVDSLVAVECATPPVRLRRRLARRRRVAQLARRLPQGQGLHLRHPPVALARRLWRPPGREERVAQGVGLGRCESA

SEQ ID NO: 4134 - DNA, 1683 bp, Myceliophthora thermophilia
atgctgaatcgctcccagaatgcatttgcgatgccctcccaagaccgtccaggcttgaataagcgtactcttcatcgtcagccgaggttgtcgcccccgggccggcaacgggagtctcggttggccactcagagcacggatgatgcggagatcacccgttctgagaagacagcgagacacagtgatatacccagggcgctggtggatgtgcatcatgacgtgcgcaagaggactgtgatcgcgccgtccgaagatgccagagtggcgacccgactcgcaaccccaccccttgcaccacaccgatttggtgattgggaaccaacggcattgactgcacgcggccgccagagcttggaatgggaaacggagacgctgctggacccaaacggtaccggtccggacggcatggcatcgtatccctgcccctatagaaagcggaatccggcgagattcaacatccgcgaccacgaggactgtgcccgatcccccttcgattccattcgagcgctgaaacagcacatcatccactatcaccaaaggaaacctgctctccgtcaatgccggcgatgcaaggagcgattcggggcggaggccgagctcgaagaacacctgctgttgcccaaggaccggatatgcgatgtgaaagaaccatgtcttgatgactacgaagatggaataacggaaaagacagcaagcatactagccgcaacagatggtgatgatgctcggtcatggacctggcagacgatatggtgtctgttgttcccaggtgaccccgaaataccagacgcagaatttcaccccgtggccgagctcgccgaggtagagcaggcttttgatgagggccaagggagtctgagagaggagctacgggagaagctcgagctgctgctgcccgaacctgtcgacccaagctatctcggtttcctcaccgggcagctggaactcgtatttgagacgcaccggatcgacgtcataaaacggaccctagcccgctgtcgtccaaatgtgttaataagcggagaagagctctctcggacgcagacgcagccagctgagcaaccgagcgtacccaagaagccgagccgcaggtccaggcggagcaccgtgcttcaggcgctccaacgcagcactcacgccccgtaccggagagactcctcggcaggcggaacaacaaccaggaatattaataatgagagtcaccagctcggagagcagtccctcctccggagtgcagagcaccacccctctgcgaggaaaccatcgccattattacacgccagaggctccctctccgccgccggcccgcgcgactcgcgcgactccggcatcggcttgccctgcgacacatgctcgctcgaaccgtgccgctgcgacgaggcggccgcccccgacacgagcgccgccctttccaccgccactgccatcaccactacccaccacaaccaacatcattatcatcatcaccatcatcatcatcagcagcagcagcagcagcggcaataccaacaccaacatggccatggacaagaacatcgcattccggcccgccggtcgcggttgaccatccagaccggagagctgcgcctgagctacacggggtccagcggcggcgaagacggcggcttctcgcccgagtcgttcaagcagaggctgctgcggcagcagctgatgggtgcttga

SEQ ID NO: 4135 - protein, 560 aa, Myceliophthora thermophilia
MLNRSQNAFAMPSQDRPGLNKRTLHRQPRLSPPGRQRESRLATQSTDDAEITRSEKTARHSDIPRALVDVHHDVRKRTVIAPSEDARVATRLATPPLAPHRFGDWEPTALTARGRQSLEWETETLLDPNGTGPDGMASYPCPYRKRNPARFNIRDHEDCARSPFDSIRALKQHIIHYHQRKPALRQCRRCKERFGAEAELEEHLLLPKDRICDVKEPCLDDYEDGITEKTASILAATDGDDARSWTWQTIWCLLFPGDPEIPDAEFHPVAELAEVEQAFDEGQGSLREELREKLELLLPEPVDPSYLGFLTGQLELVFETHRIDVIKRTLARCRPNVLISGEELSRTQTQPAEQPSVPKKPSRRSRRSTVLQALQRSTHAPYRRDSSAGGTTTRNINNESHQLGEQSLLRSAEHHPSARKPSPLLHARGSLSAAGPRDSRDSGIGLPCDTCSLEPCRCDEAAAPDTSAALSTATAITTTHHNQHHYHHHHHHHQQQQQQRQYQHQHGHGQEHRIPARRSRLTIQTGELRLSYTGSSGGEDGGFSPESFKQRLLRQQLMGA

SEQ ID NO: 4136 - DNA, 1929 bp, Myceliophthora thermophilia
atgctcaaactcgacaggataacaaggtccaagtccgcgaccaaactccccgagcaccatgtcgccgcggccggcagcgccgaggcagcgtcgggatgggcctcgtacgtcccgtcatggtccccttctcccggtggcagccgtccgtcgctgagcgaggccagggtggccggtttccgcaatccctggccgtcctggcaccggccgaccttggccgagacgtggaacagcttccgatggggcgaggacggggacggcgacggctgcgtcgagctggccgcatcccatctgcccgatcgcgccgacgccgacgccgacgatgacccggcacagccgcaggacccgcccaagagcatgcggccttctttcgccgacgcccgcgaagggccggactccacgcccgacttctcgtttccgccgggcaccacggccaagacgacctggttgggtcacgctggtgtcctggtccaactgccaccgctcgacgacgccaagctcggccgtccggtgcgcgccctcttcgacccgttgttcggggaccggtgctcgcccagtcggttcgccggcccggtccgctcgtaccctccgccgtgccgggtgcaggaccttcccccgatcgacctcgtcctcatctcgcacaaccacttcgaccacatggatgccggctccatcctgtccgtctgggaccacagccgggactcggcccgcttcttcgtgcccctcgggaacgcaaagtgtctcctcggatggggcatccctgccgaccgcgtcgtcgagttggactggtgggactcggccgacttcacatgcggtcttccaaccccggccggaaacgacagcaacaacgacaacaacaaaaacaacaacagcagcagcagtagtagtagtagtagcagtaccaatagcaacatgctccgagtccactgcaccccggcccagcacaacagctcccgctccttcggcgacaccaacacggccctctggtcgagttggctcctcgaactctccccggccacccaccatcaccaccaccaccaccaccaccaccaccaccaccaccatcagcatcaccaccgccaccaacaggagcaacaacaacaaccctaccgtgtcttcttcgccggcgacacgggctaccagttccacccggacccttcctggccgccgtcccccaacaacccgggcggcagtgaataccacgaccacgaagacaaggacaaggaggaggaggaggaggaggacgaggacgaggacgaggagggagggccgtccccggcctgcccggccttcgcgcagatccgcgcccgcatcggcgccccgcagctcctgctcctccccgtctccgtcggcgccaccttctcctacctgcgcagcttcttcgcctcctttcccctcgggctcgcctcctccttcccctcctcctcctcctcctcctcctacacccgcttcaaccccttcccgcgccacagcgccggcgtcaccgccgccaaccacttggccccctgggacgctgtccgcgtcttgcgcgtcatggccgggcctccgccgcgtcgtcgtcgtcgtcgccagaggaggcggagcagaaaagggggggaggggcggccggatgatggcaatgatgatgatgatggtggtggtggtggtgtcggggacagtgacgggggcaatgtcagtgacgaggcaggtagcggcagcggcggcggcgatggcgcggtcgccgttgccatgcactggggcacgttcgtcccggaccccgaggaggtcctgaggacgctgggcgccctggagtgggcctgccggaagcagggggtgaggttcgcgagggagctgcggaggggcaaggggcaggcgaccgctgaggatacgggcggtcgggaccgggggctggtgtttgtggcgctccatcacggtgccggtgttgtcgtgtga

SEQ ID NO: 4137 - protein, 642 aa, Myceliophthora thermophilia
MLKLDRITRSKSATKLPEHHVAAAGSAEAASGWASYVPSWSPSPGGSRPSLSEARVAGFRNPWPSWHRPTLAETWNSFRWGEDGDGDGCVELAASHLPDRADADADDDPAQPQDPPKSMRPSFADAREGPDSTPDFSFPPGTTAKTTWLGHAGVLVQLPPLDDAKLGRPVRALFDPLFGDRCSPSRFAGPVRSYPPPCRVQDLPPIDLVLISHNHFDHMDAGSILSVWDHSRDSARFFVPLGNAKCLLGWGIPADRVVELDWWDSADFTCGLPTPAGNDSNNDNNKNNNSSSSSSSSSSTNSNMLRVHCTPAQHNSSRSFGDTNTALWSSWLLELSPATHHHHHHHHHHHHHHHQHHHRHQQEQQQQPYRVFFAGDTGYQFHPDPSWPPSPNNPGGSEYHDHEDKDKEEEEEEDEDEDEEGGPSPACPAFAQIRARIGAPQLLLLPVSVGATFSYLRSFFASFPLGLASSFPSSSSSSSYTRFNPFPRHSAGVTAANHLAPWDAVRVLRVMAGPPPRRRRRRQRRRSRKGGEGRPDDGNDDDDGGGGGVGDSDGGNVSDEAGSGSGGGDGAVAVAMHWGTFVPDPEEVLRTLGALEWACRKQGVRFARELRRGKGQATAEDTGGRDRGLVFVALHHGAGVVV

SEQ ID NO: 4138 - DNA, 471 bp, Myceliophthora thermophilia
atggcggctcaggtcccgcggaacttcaagctccttgcggagctggaaaagggcgagaagggcctgggtgccggtgcatgttcgtatggtttggaggatcctgaggacatctacatgacacactggcgaggaactatctggggtcctccgcatggaaaccacgagaaccggatctacgagctcaagatggagtgcggccctaactaccccaaagagcctcctgagattcacttcgtcagccagatcaacctccccggtgtgagcccgaccgatggaaaggtggacaagaatgctgttggcatcctgcgggactggaccaggattgctgctgagctttccaagaatgcccggccaaaggaagaccccctgagcttggaggccgctctcatcgcgatacgaaagtacatggacgagcacaagaagctgccgcagccgccggagggatctaaatacccgatctacaacaactaa

SEQ ID NO: 4139 - protein, 156 aa, Myceliophthora thermophilia
MAAQVPRNFKLLAELEKGEKGLGAGACSYGLEDPEDIYMTHWRGTIWGPPHGNHENRIYELKMECGPNYPKEPPEIHFVSQINLPGVSPTDGKVDKNAVGILRDWTRIAAELSKNARPKEDPLSLEAALIAIRKYMDEHKKLPQPPEGSKYPIYNN

SEQ ID NO: 4140 - DNA, 6294 bp, Myceliophthora thermophilia
atgccgtttggactctcgccgcaggctccagttcatgtcggctcctgctcgtttctggccgatgcgaaacgtcgccaatttgcttccggttggttcaaccaaagttggtccaagcttgcagctcttggatccccgtcaagactgagaccggctgcagctcgactgacgacccattgcgatctgccaaggctcgctctctggtcttttcctgacgggggcgaaaatgatttgagacggctaaccgcaacaaccggctcagctcgcacccttccttcaacccgattcccatcttttcccctccgccagagcaccatttccagccgtgacatcgcggcgcacacctgcgcgacgcttgccgattctcccagcaccgagcacgactcaccgtgccgcgccgacggcgtcatgccgatgatggacgaatcattagaaagacacacgggctcggatgcaggctttgctgcatcaaccggcggagccgcgcctccgttctcgtcgggcctgcttgcctcggtcgagacgatttcgcgggcaacttctccgggactcccatgcggtgagcaccagccagaagatgacaagaagcgctaccgcccccgcaccttcagctatttccgcctgctcccgttcgatgtcgaggacgacgcgcgacgggatgcggccctccgcggcatcctcaagaacctctacatctccatcatggccgaggacttttctcccggcgccctccactggacccgcgagctccagggttggctgaatctcaagtttgagatgacccgggagctgcgcgctcgtctcgctcatctctactatcaccttgcgctggcgccgggtttggatcacaatacagctgaccggttctcccgcatggccatcactctgtcaaagaaaaagcactacctaaaaccgggcgaggatctcatattcgattggcggccgatgtggaaagaactgaaagcgctcgttctaccgtcagaaaccgcttcgcatcagggttcgcggaggaggtcttcgaagcaccttctgaagctctgtctccacgcgagctcgtactttgacccccgagagcgccgggcgatcctcgaggagctattgccttactttagcacctcggccatgtcgaacgcatatatcgttgctgccgcgcttaacgccatgctgcccaccagccccgcgcccccgagcgcgccccagtcgcagccgtcagacatcttcccgaccttcttccacctctggtcgctcatgaacaggtcgaaggcctttgacgtctgtttcatcgacatcttttcccgcatggctcgggaccaccttggctgcacccacgttcctttcacagaacacggcatcttcgctcgcgagcaggcagacctcatcttcaccgccatcctccggctgaccgagatcccggtcgggcaggccaactcgccatacacctcactggactacggcgccggcttgggagtgcacttggagaaggacaaatcaaagtaccccgtcccgtatatggtcgcgcgctggattgtacactccttgtccccgctctgtctcgaccgggagagctccatcctcgccaacctcgagggtctgatggagtctatcgacaccttcttccacccgtcgaatcaggggacctggaccggcttcctggcccagctcacctacttcctcactgacatctttgtctcccgctggaaccgcgaacagagtggcgagctcgaggtaccccccgaacgccggatcaatggtgagctgaagaagcgtttcgtcctcgccttgaaggaggtgaccttcatgggcatcttctcaaaaagctccaaggtcgtcaactactactactcggccctccaaggtctcgcctacctggagccggacctgatgctgcccggcgcccttcagcggttctacccgagcttacaggggcttgtcgaggtccatcgcaccacgtcgagtctttgcgggctgcagatgatcgccaacatcatggcgaagcagaagggttaccgctgccacatcaccgcgctgctggcacttgccctgcccggcatcgatgccaacgaccttggcaagacgcagtacaccctcaacttcatccagagcgtggcctacagcatcccgttcgtgcccctggccaaccaggacgacaagattcacgacacgagcctcgctatgaactgggtgcaggcagagatggagaggatggagcgcgaagggcaggacgtcaagatctgctacgacaaggagctgacagacgaggacgaggctaacatattacgctcgtccacggccggtctcggcgagttcgtcctggccttgctaggcaaggtcttcgcgctgctggagaaccttcccgatgcgagccacctccgctcgggctcacccgaggacaatgtcatcaatacgctgccggcagccctcacgcccctcttcgcatcgctctccccggagctcttcgacatggcgctcgataagctggccgcctttgtctcgagccatgtcctccaccaggctcgcgatgccatggcgtggatctgcaatgctctgtgcaaggtcaacccggagaagaccctgaaggtcttgatcccgatgttgattgtcaacatcaagaacgagatcgagtacaacggcgcggcgtcggatcggagcagcggcaccgaggttcttccccgggatcgcgcgctcgtctggcacgtcagcatgctgagcatgtgcgtcgtccacgtcggagccgaggtgttgaagtacaaggacgagctcttcggcattgccgagtacatgcaggaaaggtgccgcgggttgcccaccattcacatctctaactacatccatcatctcctcctcaacctgacgcacacctaccccatcgataacgctctctatgagcctgaccgcattgcccggggcctggacgtcgacgactgggggcgcacgacccccccttccgagctcaccatcaagtggcatcgtccatcgcatgccgaaattgtcttcgccctggagctcttcgagagccaagccaagagcgctgctcggcgaatcgaacaactaatgagcgacgatcctccagtcagcaggaagggaaagaacaaggagtggtcggacgagctgtcacggagcctgacggcgctccggttgatcatttcgggtgtcgccaccctgtttgaccccgcccgtgcctccgggaaacggggcggtcggggcgccaacggacgcgtcaagaatgacgcagatggcgatgccatgatggaggaagacaatgacccgctcgccgaggtggccgacgacgacgagctggagcgccagttccactatccggccgggtacctgctgagtcccaaagatccggtttacgaacgcatccacagcctgcgcgaggatatcgggaggttgctctcccgcacgcatgccttcttgaacgcgaaccaggaggacgacgtcgcatgcttcacggccctgtatgccacctataggacgtggatcacggacgtgggcatcgagcggtcggcccatccgctagaacgccttgtgcgcctctacaaggccgacatatctccgtttaggatcagcgggctccggaaggtctacccccggccgctgctgatcaagcgcgcggacgcgtaccagctccagcgcgtcaagtacaactcggcctatcgcaagaagagcgagctcgacaagcaactgcttctcgacctcgccgagtcatgcacctcctcatactcggacgtgcgtcgcgtggcccagggcgcccaggactcgtccctcaaggtgctgctcgggggaaggccgctcgtcatccccgttgtcctggatcggctgcgcaaggcactggaagagaacgaccatgaccgcatcaagggcgcaatgtatacgctcctcttcacgaccctgatcaagaccgccatccgtgattggcgtttcgctcccgacttgatgcgcctctacatcgagacggccagcgtcgacaaggcgtcgatccagaacctcggctcctctgccctctatccgctcttcgagtttggcaagccgctcgagcgcatgatcatctttgaccgggatgtcgtcgaggccatccggcccgatgaggattgctcggccaccatcaagcgccgccacgccttcatcaaggagcgccgcaccaaggtcgaggccaagaaggccgcgctcggcttggaactgaccgagaaggcccgcgactcccactggaaggtcgcaaatcggtgcatcgtgtttgccctgaactgcactctccgcttcgacagccttggaaacccggccttcgtggacctcatcgccaatggcgccaacgatcagcacccgagcatgcggatgaattatctgtccgccttctcggcgctcttcactgctatcgacatgcgagccgtctacggccacgactaccgaaactacctcatcgagaaggagtatgacgagaacaagactcaaatagccgtcccgaccgacgatcctaacgtgacggagaaattcctcgcccagttcgagaactacgatgatgtcaactactttgttgactgcgaccatcccggctggctggtgtgggggaaggagctcaccgtgtgccgcgccgatccgaagccgttcttggcttacgacgaggtcgagaaccgggtgagggagcagatcggaaagatcatcaccagggactggttcaagaagtgcttcgagtacctcaaacaggagcccagagatgccgggtcggaccgcttccgcatgcaaaacgccgtgctgctcatgaacgtcttcgacctcatgcattacggaaagacggccgccacgttcgaggacgtcatggagttggtcaaggaggtctacggcgacgggggtgacaagcaccagcaccgcgcgaccgccgagatcctgggcgcgctgctcacggggagtgttgacgacccaaaggagatccgggacaaggtctggaagtttgcagccccgatgatgctcaagatcatcgcggacgatctgacgcccgacacgctgtcgtactgggtgtcgtgcctccacgtcatcattgacggcaaggaccccaggcggtttcgggagctgatcgaggctctggcggcgttcaggctggacctgaactctaatgccgcgttcaaggagtctgccaaactccagctcatcgatctgatcataagcgatgccggttggcatttccggcacgagaagcccatactcgaagactgcctcgcccatatcgaccatccgtacaaggcggttcgcgagtcgatcggtaggctcatcgcctccatcttccgcactcagtaccacgagtctttcaaggacgtcacgacgctgctggagcagaacaaggccgagtccgccatcggcgtccgcgcataccggccatcccagcagttcgccgacaccatccgagacgtctttgcccgcatcgagaaatggcgccacgagcggactcccggccagcacaccccttccagctacacctcgggctctaagacggtcctcatctggctcgactgcatgctcacgtcacaggagtgcatccagttggtgcccttcttcccggaccccttcatcgaccagctcctgcacatgatggacgtcaaggaagacccggagctgatgaagctcgcctaccacgtctaccgccacctgcccaacattcccttccgctcgggcgaggacgacgccttcatcgcggcgctcatccgcgtcggcaagacggccacgtcgtggcaccagcgcctgcgcgccctcgtcaacatgcaggtcgtctacttccgccgcctcttcctcacccagcccgcccagcgccgcatgctcttcgacgccgtcggcgacatgctcaccgacccgcagctcgaggtccgcgactgcgccagcgccaccctggccggcatgatccgctgctcgcccgccaagatccgcaacccgatcatctaccagctcaaggagcgcttcgagcgcgagctgcgcctcaaccccatgcccaagaagaaggtgcccggcaccgacacccccgtcgacgcccagcggcagattgtgcgccgccacgccgccgtgctggggctgggcgcgctcatcgaggcgttcccgtacgccaccccgccgcccaagtggatgcccgaggtgctggccgggctggccacgcgcgctgcgagcgacccgggcgtcgtggggaaggcgaccaaggcgatcttggcagagttcaaaaagacgaggcaggatagctggagtgttgatcaaaagtatttcacgagtgagcagctggaggatctggagggcgtgctttggaagagctactttgcttaa

SEQ ID NO: 4141 - protein, 2097 aa, Myceliophthora thermophilia
MPFGLSPQAPVHVGSCSFLADAKRRQFASGWFNQSWSKLAALGSPSRLRPAAARLTTHCDLPRLALWSFPDGGENDLRRLTATTGSARTLPSTRFPSFPLRQSTISSRDIAAHTCATLADSPSTEHDSPCRADGVMPMMDESLERHTGSDAGFAASTGGAAPPFSSGLLASVETISRATSPGLPCGEHQPEDDKKRYRPRTFSYFRLLPFDVEDDARRDAALRGILKNLYISIMAEDFSPGALHWTRELQGWLNLKFEMTRELRARLAHLYYHLALAPGLDHNTADRFSRMAITLSKKKHYLKPGEDLIFDWRPMWKELKALVLPSETASHQGSRRRSSKHLLKLCLHASSYFDPRERRAILEELLPYFSTSAMSNAYIVAAALNAMLPTSPAPPSAPQSQPSDIFPTFFHLWSLMNRSKAFDVCFIDIFSRMARDHLGCTHVPFTEHGIFAREQADLIFTAILRLTEIPVGQANSPYTSLDYGAGLGVHLEKDKSKYPVPYMVARWIVHSLSPLCLDRESSILANLEGLMESIDTFFHPSNQGTWTGFLAQLTYFLTDIFVSRWNREQSGELEVPPERRINGELKKRFVLALKEVTFMGIFSKSSKVVNYYYSALQGLAYLEPDLMLPGALQRFYPSLQGLVEVHRTTSSLCGLQMIANIMAKQKGYRCHITALLALALPGIDANDLGKTQYTLNFIQSVAYSIPFVPLANQDDKIHDTSLAMNWVQAEMERMEREGQDVKICYDKELTDEDEANILRSSTAGLGEFVLALLGKVFALLENLPDASHLRSGSPEDNVINTLPAALTPLFASLSPELFDMALDKLAAFVSSHVLHQARDAMAWICNALCKVNPEKTLKVLIPMLIVNIKNEIEYNGAASDRSSGTEVLPRDRALVWHVSMLSMCVVHVGAEVLKYKDELFGIAEYMQERCRGLPTIHISNYIHHLLLNLTHTYPIDNALYEPDRIARGLDVDDWGRTTPPSELTIKWHRPSHAEIVFALELFESQAKSAARRIEQLMSDDPPVSRKGKNKEWSDELSRSLTALRLIISGVATLFDPARASGKRGGRGANGRVKNDADGDAMMEEDNDPLAEVADDDELERQFHYPAGYLLSPKDPVYERIHSLREDIGRLLSRTHAFLNANQEDDVACFTALYATYRTWITDVGIERSAHPLERLVRLYKADISPFRISGLRKVYPRPLLIKRADAYQLQRVKYNSAYRKKSELDKQLLLDLAESCTSSYSDVRRVAQGAQDSSLKVLLGGRPLVIPVVLDRLRKALEENDHDRIKGAMYTLLFTTLIKTAIRDWRFAPDLMRLYIETASVDKASIQNLGSSALYPLFEFGKPLERMIIFDRDVVEAIRPDEDCSATIKRRHAFIKERRTKVEAKKAALGLELTEKARDSHWKVANRCIVFALNCTLRFDSLGNPAFVDLIANGANDQHPSMRMNYLSAFSALFTAIDMRAVYGHDYRNYLIEKEYDENKTQIAVPTDDPNVTEKFLAQFENYDDVNYFVDCDHPGWLVWGKELTVCRADPKPFLAYDEVENRVREQIGKIITRDWFKKCFEYLKQEPRDAGSDRFRMQNAVLLMNVFDLMHYGKTAATFEDVMELVKEVYGDGGDKHQHRATAEILGALLTGSVDDPKEIRDKVWKFAAPMMLKIIADDLTPDTLSYWVSCLHVIIDGKDPRRFRELIEALAAFRLDLNSNAAFKESAKLQLIDLIISDAGWHFRHEKPILEDCLAHIDHPYKAVRESIGRLIASIFRTQYHESFKDVTTLLEQNKAESAIGVRAYRPSQQFADTIRDVFARIEKWRHERTPGQHTPSSYTSGSKTVLIWLDCMLTSQECIQLVPFFPDPFIDQLLHMMDVKEDPELMKLAYHVYRHLPNIPFRSGEDDAFIAALIRVGKTATSWHQRLRALVNMQVVYFRRLFLTQPAQRRMLFDAVGDMLTDPQLEVRDCASATLAGMIRCSPAKIRNPIIYQLKERFERELRLNPMPKKKVPGTDTPVDAQRQIVRRHAAVLGLGALIEAFPYATPPPKWMPEVLAGLATRAASDPGVVGKATKAILAEFKKTRQDSWSVDQKYFTSEQLEDLEGVLWKSYFA

SEQ ID NO: 4142 - DNA, 2040 bp, Myceliophthora thermophilia
atggagtggttccgtttcatccgggagatagtctggcacaatagcggttttggttcgttgagaaagatcatacctttcattgaggactacgagccgtggtttgagccccaaatcattccgctgccggcggcggcggagagcagcaacactgatgggaattcgtcggcgaatggggcgggagaggatcaagaaccagctccctcggtcgtttacccaaaagcccggtactactcggtggcagactatcgtgagctctatctctcggggaccctgacgccaaccgacgtggctgaggcattgctgcccctgattcggcgagacgttgacaaccccacggagcactcgaaagctttcttcgagacccgggccgagaaggtcctcgagcaagtctggcacaatagcggttttggttcgttgagaaagatcatacctttcattgaggactacgagccgtggtttgagccccaaatcattccgctgccggcggcggcggagagcagcaacactgatgggaattcgtcggcgaatggggcgggagaggatcaagaaccagctccctcggtcgtttacccaaaagcccggtactactcggtggcagactatcgtgagctctatctctcggggaccctgacgccaaccgacgtggctgaggcattgctgcccctgattcggcgagacgttgacaaccccacggagcactcgaaagctttcttcgagacccgggccgagaaggtcctcgcggcagcgaaggcatccacccgacgttacaaagaaggccgctcacttgggccgttggacggcgtcccgactgcggtcaaggacgagtatgacgttgagggctaccgcacctgcctcggttcgcgcaacacctacttttctcccgaagaccacggcacctcctggtgcgtgcaaaagctcgaagctgcaggcgccctcaacctcggcaagctctcgatgcacgagttcgggctcgacactaccggcaacaacccgatctatggcaccccccgcaacccgcacaatccaacctactacacgggtggctcctcttcgggcaccgcctatgccgtcagcgcggggctcatccctatcggcctcggcagcgatggcgggggcagcatccgcatcccatccagcctctgtggcgtcttcggcctcaaacccacccacggccgcttgtccttccgcccgggcgcgaaccactgcataagctgtgcctgcctcgggcctatcgcgtccgacatgtcctccctcgcggccgtgttctccgtcatctcagtcccagacccgtcctcccccttccccccgctccccacccccttatctctccggctcccaaggccggacgaccccaaaatcctcggcatcccctccgcctggaccgcccgcgccacgccggccatccaagccctatgcaacagcctggtccacgagctggtcacctcgcacggctacaccacggtccccatcgagatccccttcctccgcgagggccagcttgcgcacgccatgacggtgctcaccgacgcagcgaccctgctgccgcccgataaaacgaggaacctcaccccggccaaccgcatcctgctggcgctggggcgtgtcaccccggcgaccgactacacgctggcgcagaagctgcgccgcctgctgatgcagcacctggcgtggctgtggcaggagcacccgggcatgctcatcatcacgccgacgacggcgtgcgagggcctgccgatcctggacgccgcggccgaaatgcgctggggcgtcaacgaaggcgaccgcaccatggagagcatggagtacgtctggctggccaatttctgcgggcttcccagcctgagcgtgcccgctgggttcgtgcccggcaggaaggggacggcggatgtgccggttgggttgatggctaccggggagtggtgtgccgaggagcagctgctgaggttcgggaggttgctggaggaggttggggctgataggaggaggaggcccaaggtatgggtcgatgttgttgccgagagtaagaagaggaggacgtaa

SEQ ID NO: 4143 - protein, 679 aa, Myceliophthora thermophilia
MEWFRFIREIVWHNSGFGSLRKIIPFIEDYEPWFEPQIIPLPAAAESSNTDGNSSANGAGEDQEPAPSVVYPKARYYSVADYRELYLSGTLTPTDVAEALLPLIRRDVDNPTEHSKAFFETRAEKVLEQVWHNSGFGSLRKIIPFIEDYEPWFEPQIIPLPAAAESSNTDGNSSANGAGEDQEPAPSVVYPKARYYSVADYRELYLSGTLTPTDVAEALLPLIRRDVDNPTEHSKAFFETRAEKVLAAAKASTRRYKEGRSLGPLDGVPTAVKDEYDVEGYRTCLGSRNTYFSPEDHGTSWCVQKLEAAGALNLGKLSMHEFGLDTTGNNPIYGTPRNPHNPTYYTGGSSSGTAYAVSAGLIPIGLGSDGGGSIRIPSSLCGVFGLKPTHGRLSFRPGANHCISCACLGPIASDMSSLAAVFSVISVPDPSSPFPPLPTPLSLRLPRPDDPKILGIPSAWTARATPAIQALCNSLVHELVTSHGYTTVPIEIPFLREGQLAHAMTVLTDAATLLPPDKTRNLTPANRILLALGRVTPATDYTLAQKLRRLLMQHLAWLWQEHPGMLIITPTTACEGLPILDAAAEMRWGVNEGDRTMESMEYVWLANFCGLPSLSVPAGFVPGRKGTADVPVGLMATGEWCAEEQLLRFGRLLEEVGADRRRRPKVWVDVVAESKKRRT

SEQ ID NO: 4144 - DNA, 2043 bp, Myceliophthora thermophilia
atggccgcatcattcagaccgggcccatcagaattctctgcatcgcagacgtgcgaggtgcgaacatgctttgcgacagtccggactctgcgccggtttattgacacgagcgacacaggcaacctccgctcccttaacgaactcgcccgctcggcccgcgccgattacatcattcacaccggcgattttggtttctacgatgagacatcccttgagcgcattgctgaaaagaccctgaagcatgtcgcgcagtattcccccttgatttcggaaaccacgaagaaagccatcgcacaaggcgttcagggttcggtcaagtcgcggtttccagcaagcgagctccccctgtcagagcttccgcagctcctcagcggcgagctgaaattggacgtacccgtctacacagtatggggcgcttgtgaggacgtgcgggtgctggagaagttccgatcaaaggagtacaaggtacccaatctctacatcatcgatgaggcgcagtccatgctgctcgaggttggcggtgtgaagctccggcttctcggcttgggcggcgcggtggtcatgcacaagctgttcgacaatggcgaaggccggacaacgattgccggtggccagggaacaatgtggacaacgttgttgcagatgggcgaactcgtcgatacggcgaaccgcgtctacgatcccaccgaaacccgcatcttcatcacgcacgcatccccggctcgcgagggcatcttgaaccaactctcagtgaccctcaaggcggacttttccatctcggccggcctccactttaggtatggaagctcgtacaacgagttcagtgtcaatcccaccctggaccattaccgcggcaaactggcggcgtccaaggcgtcattcaatgacgtatgggagacggtcaagggtgaagtcgagccggctatcagccaggtcgaggcccaacaaaccttgcttaagaatgcgttggccgttgttgagaagatgccctcgaccgcagccggcggaaacccctttggcggagcgcctgccggccaatcggccgcggctctcggtcaggtcgacgaaagcgccttcaagaacctgtggaacttcaaccttgcggatgctacctttggctggcttgtcctggagattcaggatggtcgaattggtaccgagatgcgggctcagggattcaacttctcgcaccgtggagccaaacaacagccgaatgtgcagcccgccccgggcccctcgggcgcgggtacgagcccagccgcccccacaggtccttctgcgccgccagcagccacccctgcagctcaaccgaaagcccccactcccgcccagcagcctaaaccctcggctccgacacctgctccggcccagagcaagcctgcaaccccccagcccgcgccggctacttccccggcactcaaggaacagaaggcggccccggccgctgctaacggcgctgccgcttcgtccgaaacagcacctgctccagcgtcgaagaccccggcagacaatattattgggctcttcatcatgaacgctcagagtgatgagcaagtacgcgacctgttcgctgaggaggacaaggccaagatcgtgaagatcgaccggtggggcgcaaacaacaaggtggcgcagttcaagacgacggaagaccgagacgctgccatggagcgactcccggatgaagtcaagaaccgcgcgcccgggcaggaggatcgctcgaagccgctcgtcaagatcttttcaccgcctccgcgccagttctcacgcggcggtgctgcgctggtggcggaggtgctagcgacagcgaaggtgctggacgccgcggtgggcgtggtggccgaggccgcggtggtgagcgcggacggggcagaggcccgcgaggtggcggcgcgaagggcgagggtgctggctctgctccatcggctgactcttaggggcctcagcctgcagtcagagtactgcccaagacggatgagtggtaccgacatggtcgctcaacgtccggataaattttctcatagggttccgtcctgtcgctga

SEQ ID NO: 4145 - protein, 680 aa, Myceliophthora thermophilia
MAASFRPGPSEFSASQTCEVRTCFATVRTLRRFIDTSDTGNLRSLNELARSARADYIIHTGDFGFYDETSLERIAEKTLKHVAQYSPLISETTKKAIAQGVQGSVKSRFPASELPLSELPQLLSGELKLDVPVYTVWGACEDVRVLEKFRSKEYKVPNLYIIDEAQSMLLEVGGVKLRLLGLGGAVVMHKLFDNGEGRTTIAGGQGTMWTTLLQMGELVDTANRVYDPTETRIFITHASPAREGILNQLSVTLKADFSISAGLHFRYGSSYNEFSVNPTLDHYRGKLAASKASFNDVWETVKGEVEPAISQVEAQQTLLKNALAVVEKMPSTAAGGNPFGGAPAGQSAAALGQVDESAFKNLWNFNLADATFGWLVLEIQDGRIGTEMRAQGFNFSHRGAKQQPNVQPAPGPSGAGTSPAAPTGPSAPPAATPAAQPKAPTPAQQPKPSAPTPAPAQSKPATPQPAPATSPALKEQKAAPAAANGAAASSETAPAPASKTPADNIIGLFIMNAQSDEQVRDLFAEEDKAKIVKIDRWGANNKVAQFKTTEDRDAAMERLPDEVKNRAPGQEDRSKPLVKIFSPPPRQFSRGGAALVAEVLATAKVLDAAVGVVAEAAVVSADGAEAREVAARRARVLALLHRLTLRGLSLQSEYCPRRMSGTDMVAQRPDKFSHRVPSCR

SEQ ID NO: 4146 - DNA, 1539 bp, Myceliophthora thermophilia
atggccacattcacaaggatcgaggacggcgaaagcccctccattaccatccatccctcgcacaagattgccaaaatcagcgacaacatctatggcggcttcacagaacacatggggaggtgcatctacggtggcatctacgaccccggcaacccgctctcggacgagaacggcttccgcaaggacgtcatcgaggcccttaaggagctgagagtgcccgtggtccgatatcccggcggtaactttgttgccacgtacaactggctggacggcgttggcccgaaggagaagcggccaaagaggccagaattggcgtggatcggcgtcgagaccaacgagttcggaacagacgagttcatgaaatggtgtgaagtggtcggggccgagccgtacctctgcctcaacatgggcactggcaccctgtctgatgctctcgcctggctcgagtactgcaactcggaccgcgacacatactacgccaacctgcggcgtaagaacggccgtgagaagccatacaatgtcaaatactgggcgctcgggaacgagtgctggggcccgtggcaggttgagcagatgaccaaggaggactacgcaaagaaggcgtaccagtgggccaaggcgctcaagttgctggacccgagcatcacgctgatcctgtgcggcgagacgggctactcgtcctgggaccaccacgtgctcaaggagtgcgtccgctgggacgtccacgggctcggggaccagaaccagaccaagtcgctcatcgacatgcacagcatccacgtctacacggccgaccgggagcacctccccaacgcgacggcgccccgcagcgccgagcgcgccatccagatggcctcggccctgatcgacctggcccggatcgagaacgaggtgccggcgacggttcccaagcaaaagatctgcttcgacgagtggaacgtctgggaccccgtccgcgcccccggcgagcagggggccgaggagcgctataccctctcggacgccctggccgtcgccgtctggctcaacgccttcgtccgccaggcccgcgacctcggcatggccaacatcgcccagtccgtcaacgtcatctcgcccctcatgaccacccgcgacggcctcgtcaagcagaccatctggtggcccctgctgctcttcagccgctacatgcgcggccacaccctcgccctccacgtccgcggccccgagtacaccggccggacccggccggcctggatccgcgccgccatcgagaccccttacctggactgcagcgccgccctgggcgacgacggcttcgtcaacctcgccgtcgccaacctgcacgagcagaacgactaccccgtcgacctcgacggcctccgcatcgcccacggcgaccgcgtcgccgtcttcctcgtcaccggcgaccacgtcggcgtcgccaacacggccgacgagcaaaaggtcggtatcgccgagagctcctgggacggcaagggcaagttcaccttcgtcaagcactccttcaccctgctgaggtggaagccggccgagtaa

SEQ ID NO: 4147 - protein, 512 aa, Myceliophthora thermophilia
MATFTRIEDGESPSITIHPSHKIAKISDNIYGGFTEHMGRCIYGGIYDPGNPLSDENGFRKDVIEALKELRVPVVRYPGGNFVATYNWLDGVGPKEKRPKRPELAWIGVETNEFGTDEFMKWCEVVGAEPYLCLNMGTGTLSDALAWLEYCNSDRDTYYANLRRKNGREKPYNVKYWALGNECWGPWQVEQMTKEDYAKKAYQWAKALKLLDPSITLILCGETGYSSWDHHVLKECVRWDVHGLGDQNQTKSLIDMHSIHVYTADREHLPNATAPRSAERAIQMASALIDLARIENEVPATVPKQKICFDEWNVWDPVRAPGEQGAEERYTLSDALAVAVWLNAFVRQARDLGMANIAQSVNVISPLMTTRDGLVKQTIWWPLLLFSRYMRGHTLALHVRGPEYTGRTRPAWIRAAIETPYLDCSAALGDDGFVNLAVANLHEQNDYPVDLDGLRIAHGDRVAVFLVTGDHVGVANTADEQKVGIAESSWDGKGKFTFVKHSFTLLRWKPAE

SEQ ID NO: 4148 - DNA, 294 bp, Myceliophthora thermophilia
atgtccaagcatcttgagccgcggctggccccggctgaggtctcgtcctgctctgcggtggacgattcggaggctgagcttggaggcgaggctttgccatgcatcatcacttggctgaaaggggagctgatcatcatcctcctgctcaaccccgcggcgtcggccaatggtcgtatcagggctcttgccaagctcgtactggaaagttcctgttggatcatcgccaggggcaccctctgccgtggcgcggtggtcacggcaatcacagcagcccagaccataacaggcggttag

SEQ ID NO: 4149 - protein, 97 aa, Myceliophthora thermophilia
MSKHLEPRLAPAEVSSCSAVDDSEAELGGEALPCIITWLKGELIIILLLNPAASANGRIRALAKLVLESSCWIIARGTLCRGAVVTAITAAQTITGG

SEQ ID NO: 4150 - DNA, 447 bp, Myceliophthora thermophilia
atgttccgagtgcatatatgctttcttccttcgtttcgcctttctttcaactctatttcaaccgaacgtctccatggcctgcattcctacgatcccggatcacggaccaaacgtgccaatggagtcctcctcgaccagatatatttgctgatcagcagctctacaacgcaaattatgttcccgatcttccccaagaatcctgcttctcgtgagctcgaagattcagttgagggatactcggtaccaacgattgaactcgaacctccctgtcaccccgctcgcgatttgcatagacatctggggaaaacagagggtggcggtctgcggtggtatgcgaggacgtcgttttatgtccggggagggccggcatgcatgcagtttgaggcgaaactgatgcggctgccccattgccatacagacacgagccagcaaaagcgacagaagtga

SEQ ID NO: 4151 - protein, 148 aa, Myceliophthora thermophilia
MFRVHICFLPSFRLSFNSISTERLHGLHSYDPGSRTKRANGVLLDQIYLLISSSTTQIMFPIFPKNPASRELEDSVEGYSVPTIELEPPCHPARDLHRHLGKTEGGGLRWYARTSFYVRGGPACMQFEAKLMRLPHCHTDTSQQKRQK

SEQ ID NO: 4152 - DNA, 3072 bp, Myceliophthora thermophilia
atgccgggctcgactaccatgctgaacgatgcgccttcaggaaccctgagcggacgttccgatggcgcaaaaggcgggaagcgaccgttgccgcatatcgacgacatcacctccgtcactgtagacgtcgacccgtacgcgcccgtcgagaaagtccttcaggcggcagagagctatttgcggcaagctgagtcgtccaaaaattttggccgacccgaccttgcgctcaaagactacatacggaccaacattcttcttctcgatgtcgtaaagcagaacaagggatgggtgtcactacagcgcgacaacagggcccaatttgagcgataccagcggcttgtacggcaggtacatgccgcgcacggagattttgaggctatcaaggaccaaataaaggccgacaacgcgagaacgggggttgagcccaccagtcgctccgcaggatcggctggaaagggtgctgctatcaacggacaggataaggacacaaccccaaacggcaccgcaaaagagaacggtgttgcggcgtcgcctccaccgagaagcaagcccgtcgtccacccaaagcccaaaaatctccatggaaatgcgctaccgccaggaccgggggcggccacccaggccaaggcccaggaccttgttcagcgtttcgcaaacctccgagcgggcgcaaacaacgcttcccgcggcgcacacgctaggacacaatcagaaatgtcgccagcgcgaatcgggtcgctggcatcctcagaggtgccgctttcgagtccgccgttgaatggcgctattcccgagttaccccggatgcccgccgctatttacaacccaccacgaggcactatctcgagcgagacggctgctcttcccaccagcgctcctcgcgccatgtttacgaggactagttcggcagcctctctaagcactgtcaaagcgaacaatccaccacgttctcctgaaggcgcagcatccacaagcgcttcagtgaagcgggctagaccggctgtcccagatggggacacaatatctgttgaggatctgctccggtgcatgaggactggcgccaaggacctgtctatccttctcattgacatcagaagtcgtgaggatttcgatgagggtcatgtcatgtcgcaggccactatctgcgtcgagcccgagatactcacaagagaccatatttcggcgaatcaagttgcagatagcatggttttggcgccggcagccgagcaactactcttcgaaaagcgccacgagttcgacttggtagtgttctacgaccagaactccgagcagatccctgacagaccgcagacaccccaagcgaaggctgtatctggcttgttcaatgccctcagccaatatgatttcccaggtgcatcagggttgaagatttcgccgaaattgttgcgagggggtatagaagcgtggaccagtctggtgggcagcgcgagtctgcagtcctcctcgacgacggcgtccagaaagtacccagcaagccccatgacacggtcgtttctcaactcgcgccaaaagtatgttactcgaccaatccaggatccggcagaagccaagcggtgggaggataccattgccgatactggtgggatatcacccgtcaggacaaccgaggactttctccgccggttccctcccatttcggagcacaaggagtcgatggtgtctcccgccagccctccaatgagtcggccgcagagcccttttcagtctcgcctctctcacgaagagaatctttacaagtccctcccgtcgccaccgacgcgcccgcctccagcagtcccccggagaagctacagcggacttgccgaagccgaagacaattccttggtgctggccaagaagtccgggccccaagttgtcgacacagtgcgaaagtttcggacaggtctgcagaatccgggcgttttctgttttgcgaacagttctttgcaagccatgttcgccacgccgggctttgcgcgcgagatatggacaggggcttggaaggaattgtataaggtgcctatgaagccggacgagaagtttgagaatccccagcttctcatcaagtgcttgaccaacctgtttcactggctcaaccaaggttcactccgatcactcgcggctaagacgttcatggaatacatccatttcatccactctaagagctcggacggtaaaaagaagccggactgcgacatcttcggaggctcctctcagcaggacgcccaagagttctactctttcatcatggacaacattcatgacgaaacaaacgtccgtcgggacgtgaagccttccaaggaagagaagccctacacgccaaaggacggcaccatcatccaaaacgccatggactattggcgcgactattccaaatacagcgcctcaatcatagacaagtacttccgcggcctcgaggttttcatctcacgctgccacaaccccgcctgtcgccaggagatccgcctcttccagccgtgcgacgtctggattctcaacctcgccggcatgggtgacccaaccgaccttgacagcctgctcgccaaccatcagacctcggagcacttccccgatctggtctgcgagacatgtaacaagcccgggcgcacgcgcaaagccaagtttgcgcgcctccccgaccgcctcgccttctgcctcaatcgctttaacagcgccggcgccggaggcggcggcttcagtaaccggttcatgtcgtcgggcaagatacatagcaaggtccggttcccgatccgcgacctcgacctgacgcgctactgtgccgagcccgacccggacatggcgacgacggatgaccgccactttgccggcaagatgcggtacgattgttacgccgtcacggtgcatgtcgggcaggggatcaatggcgggcattactacagctacgtgcaggacgagacatccaaagacccgaccgattggttcagatgcaatgacgaagtggtcgaccgtgtcaagatcgggagtgggcagccgggagatatgaccgaggccatgtatcagaacggtaatacgtcagcgtacatggtcttctatcggcgacaggggacatga

SEQ ID NO: 4153 - protein, 1023 aa, Myceliophthora thermophilia
MPGSTTMLNDAPSGTLSGRSDGAKGGKRPLPHIDDITSVTVDVDPYAPVEKVLQAAESYLRQAESSKNFGRPDLALKDYIRTNILLLDVVKQNKGWVSLQRDNRAQFERYQRLVRQVHAAHGDFEAIKDQIKADNARTGVEPTSRSAGSAGKGAAINGQDKDTTPNGTAKENGVAASPPPRSKPVVHPKPKNLHGNALPPGPGAATQAKAQDLVQRFANLRAGANNASRGAHARTQSEMSPARIGSLASSEVPLSSPPLNGAIPELPRMPAAIYNPPRGTISSETAALPTSAPRAMFTRTSSAASLSTVKANNPPRSPEGAASTSASVKRARPAVPDGDTISVEDLLRCMRTGAKDLSILLIDIRSREDFDEGHVMSQATICVEPEILTRDHISANQVADSMVLAPAAEQLLFEKRHEFDLVVFYDQNSEQIPDRPQTPQAKAVSGLFNALSQYDFPGASGLKISPKLLRGGIEAWTSLVGSASLQSSSTTASRKYPASPMTRSFLNSRQKYVTRPIQDPAEAKRWEDTIADTGGISPVRTTEDFLRRFPPISEHKESMVSPASPPMSRPQSPFQSRLSHEENLYKSLPSPPTRPPPAVPRRSYSGLAEAEDNSLVLAKKSGPQVVDTVRKFRTGLQNPGVFCFANSSLQAMFATPGFAREIWTGAWKELYKVPMKPDEKFENPQLLIKCLTNLFHWLNQGSLRSLAAKTFMEYIHFIHSKSSDGKKKPDCDIFGGSSQQDAQEFYSFIMDNIHDETNVRRDVKPSKEEKPYTPKDGTIIQNAMDYWRDYSKYSASIIDKYFRGLEVFISRCHNPACRQEIRLFQPCDVWILNLAGMGDPTDLDSLLANHQTSEHFPDLVCETCNKPGRTRKAKFARLPDRLAFCLNRFNSAGAGGGGFSNRFMSSGKIHSKVRFPIRDLDLTRYCAEPDPDMATTDDRHFAGKMRYDCYAVTVHVGQGINGGHYYSYVQDETSKDPTDWFRCNDEVVDRVKIGSGQPGDMTEAMYQNGNTSAYMVFYRRQGT

SEQ ID NO: 4154 - DNA, 1182 bp, Myceliophthora thermophilia
atgggtatcaacaatcctcttccgtcctcactggggtcggaatgcaaaaagtgcgccaagatccttacctccttcattgatccgcgtcaggccttcggtcctgaaaaggttattcctccatccattctcgccaatgccaagggcctcgcgatccttaccgtcctcaaagcgggcttcctcggatcggggcgcttcggcagcggcctcgtggtcgcacggctcccggatggctcgtggagcgcgccgtccgcgatcgcgacggccggcgccgggttcggcgggcagatcgggttcgagctgaccgacttcgtcttcatcctcaacgactcgagcgcggtcaagaccttctcgcaggccggctcgctcacgctgggcggcaacgtgtcgatcgcggcggggccggtgggccgcaacgccgaggcggccggcgccgcgtcgctgcgcagcgtcgcgggcatcttcagctactccaagaccaagggcctcttcgcgggcgtctcgctcgagggctccgccatcatcgagcgcaaggacgccaacgccaggctgtacggtcgccccgtctcggcgagggagctgctgatgggcggcgagcgcccgccgccgcaggccgccccgctgctcagcgtcctcaactcgcgcatcttccggggcatcggcggcccggggggcatggcggacgaccggatgtacaacgacatacccgtgtacgacgaccaccgggacgaggtcgtctggggcggcaagaccgggccggcctacggcgagggccagccgagggacggcgggtacggcggcggcggcgggtacggcgtgcaggcgcacgacgagttcgggcggcccaagcggtcgacgacgtggcaggacgacgtctacgaccagcagccccggtcgttcggccagcaaccgccgtcgcgctcgagcacgttccaccacgacggcccgcccgggcggccggcggcgcccaagcccaactacgccagcaaggaggcgctgctcaagaagaacgaggccatcgcgctgtataactttgagcccgaccaaccgggcgatctgggattcaagaagggggacattatcacggtgctgaagaagacggacagtgacaatgactggtggacaggaatgatcgggacgaggcacgggatattccccagcaactatgtcaagatgagggagtga

SEQ ID NO: 4155 - protein, 393 aa, Myceliophthora thermophilia
MGINNPLPSSLGSECKKCAKILTSFIDPRQAFGPEKVIPPSILANAKGLAILTVLKAGFLGSGRFGSGLVVARLPDGSWSAPSAIATAGAGFGGQIGFELTDFVFILNDSSAVKTFSQAGSLTLGGNVSIAAGPVGRNAEAAGAASLRSVAGIFSYSKTKGLFAGVSLEGSAIIERKDANARLYGRPVSARELLMGGERPPPQAAPLLSVLNSRIFRGIGGPGGMADDRMYNDIPVYDDHRDEVVWGGKTGPAYGEGQPRDGGYGGGGGYGVQAHDEFGRPKRSTTWQDDVYDQQPRSFGQQPPSRSSTFHHDGPPGRPAAPKPNYASKEALLKKNEAIALYNFEPDQPGDLGFKKGDIITVLKKTDSDNDWWTGMIGTRHGIFPSNYVKMRE

SEQ ID NO: 4156 - DNA, 3630 bp, Myceliophthora thermophilia
atgtcgtccgccgccatgtcgagcgactttccggaactcggcagcgggccgaagcccgcggccaacgtggcccccgtctggcttgcgcgggctcctggagcgtcggctccggcctctggacgggcctccggcgccaccacacccgtcccagaagcgtcgacggtcccgagcctctcgatcccgggccagaacaaggagtacctgctcctgcatcctgacgacatccttccccgcgagcaattgaagcggccgctccccgacatcgtcaaggacttcaaccgcaagtctcgcgcccagatcaagatcgttcctcatgccgaaaacatgctcaggattgaggcgacggggcccaagagcgacagcacgacccaggcgctcaaggacttcgttggcttgatcggtgccaagctgaagctcgagctggacattcatcgctgggcgcgaccgcacatcattggcaagggcggggccaccatcaaggccatccaagagaagaccggcgctcggattcacgtccccaaggaggacggacatgcggcccccgccggagaggatgacgacgagctcatcaaggtcgttatcgagggcaacactcagcaggctgcccacgcccagaatctcatctacgagattatgggcgagcgcgccggcacggtcagcctcacgttgaaagacgtccctgcggaattctaccccttcattgctggcgccgacaacagcaatatcaagcccatcgagcaggaattcggtgtccagatcaatgttcctgccgcccagccctcttcgtcgacgccgcccgtgccagtcgcctccggccgtcccgagttctttgccgccgccgatagctttatccagctgcgcggcgaacgctatgccgccaaggccgccagggccaagattgaggagcgggtccaggagctccgggatcagttgacggtacagccggtacacatccagccgggccgtcaccagttcatcatcggagagaagggcatctcgatggagcagttcttcgaggagacgggatgcaccatcgtgttgccaaatgacgaagaggacgacatggtcagggttgttgggcctgccgaccaggccgccgtcggcgtgcagaagactgtcgacctcgccatgggcatgcagtgttccaacttcgacatctcgcgcttctaccgccaggcccctggtggcgctgcggtccatgcgcgcaatgttacgcgctacctgaggcaaaagcgggagcttgagcggctgggaaatctctatagtgttcacttcaatacccccttctcggagcagggcgctctgccgtgggagctctatgcgcgcgatggcgccaatattgtcagagcccaagcggaaatcaaggctctggtcgacgctcacccgccggcacggatggctaccgtcaccgtcgatcccttctactaccagtacatcaggaaagaggtcttgccccatgtccgacagacgtatggtgtacatttggtgatcccggagaattcggaacccaatgctccccttctgttggtgtatgagggtccctcgaatccggagtcgtacgaaatcgctcgagaacagccgaagcagaaagacatcagcgagatgcaaaagggacttcaggatgcccaaagctatattctcggcctgatgagcgagcgggagccaatcgcgtccaagacgattgaagtacccgtaaagttccatccccggcttcagaagtttatcaagaatgagcaggacaacgcctccaacccgattcgcgcccgcgtgtccaacaccggcgaatccgttcacattcgcggccctagctctgttgtggagtggcttgtggccaagtgcctcgacttcgtcgagcgagagaagcaggacgagaaggagcgcggatttaccctggaattcgatttcccccagaagtttgcaaaccatttgatcggtaaaggcgggagccacatccgggagctcagggagaagttcgacgtcgagattcaggtggacgatggcaaggtgcagctgaaggggccaaaggccaaggccgaggctgccaaggcgcacatcactgccctcgcgcgtcagctgcaggatgaaacgacatacgtactcaagattgaccccaagttccaccgggaaatcatcggcgcccagggaagccaggtcaataagctgcagacacggtacaaggtcctcattttcttccctcggaacaacgcaaagggcaccaaggacgacgagtctctcgccgactcatccagcgatgccgggaagggccgccgtcaacaagcccccgacgaggtcattgtccgtgggccgaagcggggcgctgacgaggctcgtgaggagctgctgtcgctcctgcagtacctcaaggacacctcgtttaccgccaccgtgacagttcagaagaaacagcttccctcgttgatcggctccggtggtgctgctctggagcaattgcgccaggagacgggggctaagatcgatgttcccagcgcgaaggagtcgaccgaggatcaggtggacatccagatcaagggcaccaaggcgcaggtggctgctgccaagaagattttggaggagaagaaggccatcttcgaagacaccatagtcaagaagattgatgtgcctcgaaagtaccaccgggcgctcattggcacgggtggttctactctccgcgacatcatcgtcaaggctggcggctcgagtgatcagcgagagatggcccgcaccatccaattcccgaagcaagacgccgacggcgacaccatcaaggtcgagggccgcagcgagatcgtggacaagattgtcgcacgcattgaggccatggtggccgagcgcgagagccagatcaccgagacgctggatgtgcctgtcgaaaagcacaggtccattgtcggacgcggcggcgagaccaagcggaacattgaggcccagttcaaggtctccatcgacgttccccgtcagggcagcggcagcacaagcgtgaagattgtcggtcaatcgcccgatgtcgaaaaggccaaggcccacatcgaggacttggtcaaggaacagccgggcgagaccatcatggtcccccgagctcttcaccacgctgtttccaacaatggccagatcttccgcaagttcaagagcgaatatggcgtcactgtcgatcacgcgggccagcccattccaccgaagcctgcggtcgcaacaaacgcacgcgctaatgggggttcgctacccttgatcactgacgacgaagacgcaatcgccgacgcccattcctggaaggtggtggagcaggcatccaccgaggagggcgacatcccctgggttctccgcggctcgccggaaaatattgaaaaggccaaaaatgccatcaagtctgcgcttgaccaggccaacaagcagaacgcaaccggctacctagtcctgcccgacccgaagacgtaccgcttcgttattggccagggcggcagcaaggtcaactccatccgcaagcagagcggatgcaagatcactgtcccgcgtgaccagacgcagggcgatgccatcgagatcgtcggcaccaaggagggcgtggagaaggcaaaggagctcatcttggcggccgtgaaagagggtcttagctcgagatcgcctcgcgagtag

SEQ ID NO: 4157 - protein, 1209 aa, Myceliophthora thermophilia
MSSAAMSSDFPELGSGPKPAANVAPVWLARAPGASAPASGRASGATTPVPEASTVPSLSIPGQNKEYLLLHPDDILPREQLKRPLPDIVKDFNRKSRAQIKIVPHAENMLRIEATGPKSDSTTQALKDFVGLIGAKLKLELDIHRWARPHIIGKGGATIKAIQEKTGARIHVPKEDGHAAPAGEDDDELIKVVIEGNTQQAAHAQNLIYEIMGERAGTVSLTLKDVPAEFYPFIAGADNSNIKPIEQEFGVQINVPAAQPSSSTPPVPVASGRPEFFAAADSFIQLRGERYAAKAARAKIEERVQELRDQLTVQPVHIQPGRHQFIIGEKGISMEQFFEETGCTIVLPNDEEDDMVRVVGPADQAAVGVQKTVDLAMGMQCSNFDISRFYRQAPGGAAVHARNVTRYLRQKRELERLGNLYSVHFNTPFSEQGALPWELYARDGANIVRAQAEIKALVDAHPPARMATVTVDPFYYQYIRKEVLPHVRQTYGVHLVIPENSEPNAPLLLVYEGPSNPESYEIAREQPKQKDISEMQKGLQDAQSYILGLMSEREPIASKTIEVPVKFHPRLQKFIKNEQDNASNPIRARVSNTGESVHIRGPSSVVEWLVAKCLDFVEREKQDEKERGFTLEFDFPQKFANHLIGKGGSHIRELREKFDVEIQVDDGKVQLKGPKAKAEAAKAHITALARQLQDETTYVLKIDPKFHREIIGAQGSQVNKLQTRYKVLIFFPRNNAKGTKDDESLADSSSDAGKGRRQQAPDEVIVRGPKRGADEAREELLSLLQYLKDTSFTATVTVQKKQLPSLIGSGGAALEQLRQETGAKIDVPSAKESTEDQVDIQIKGTKAQVAAAKKILEEKKAIFEDTIVKKIDVPRKYHRALIGTGGSTLRDIIVKAGGSSDQREMARTIQFPKQDADGDTIKVEGRSEIVDKIVARIEAMVAERESQITETLDVPVEKHRSIVGRGGETKRNIEAQFKVSIDVPRQGSGSTSVKIVGQSPDVEKAKAHIEDLVKEQPGETIMVPRALHHAVSNNGQIFRKFKSEYGVTVDHAGQPIPPKPAVATNARANGGSLPLITDDEDAIADAHSWKVVEQASTEEGDIPWVLRGSPENIEKAKNAIKSALDQANKQNATGYLVLPDPKTYRFVIGQGGSKVNSIRKQSGCKITVPRDQTQGDAIEIVGTKEGVEKAKELILAAVKEGLSSRSPRE

SEQ ID NO: 4158 - DNA, 3906 bp, Myceliophthora thermophilia
atggcgttttcatcacctggacaagcccgagcactttgttctacagatcaggtgcctgcaacagacagcttgcgagactcaccaaacggattcgagatttgtggcgaagataccaaagcagccgggatcaaacagcaggaccatctctccgttgcctcccggtcaccagaggtaaatggcgaggaccggcagggagtttacgtggaagcgggcgttgatcatgattttgtgctacttgagaaaccatcagctctttccaaatccattgatctcgccggggcagcctgcagccctcgctcccagatgccttccctaggcagcgagccaactcatgacgttgagaacaacgaattcaaggccaccaatgttctgaatcgaccgcgaacacagccatcaacaagagaccatcgcgacacatcacacaacagtgacaagctcgaccgaactgaggcgggacgagaagattcgcagatggatagaaagttatcttcctcagacatcccttgtgtcaagagagcagatctctcgacccaagattggaggaccgaggtagagaatgggtcgcctggtgccttgagcgaggaaggaaacaactgtcagggcgttctcccggctctggactcggcatccaaagcaaaaccgtgcgcgtcctccgcgccgctacaaagtcatagtaacaacgcaacttcccgtcctaggccatgttggctcagccagtcagaaccgctcacagccacggcagaaaatgcagtcgggtaccatcacaacgcacccgtaccactgactggcgacccacagcactctgcaaaaaagccaagagactggcatcagagccgcatggtcaatcggccagtgagagaaatagcagatgtcaaaccgatcaaaccagttcaccatgctcgtccagagtcacggagctccaatatttcgaagtcgaggttggtgcctgctgcacgctctccatgtccgatggtgtggcagaggagagccaagatcagccacgaattcacgacggagatagctggggtgatcaaccagtttacgcagcaacaaagcgccgcaattgaagaacagaaagcgaagtatcacaagtatatcaaacgactgaaacgcgagcttgtagaggaatccggcgttataactcagcaaatgtctcaaattgacgcccaggctaacaggatcgaagacctacaaaactcaaaagaacacgttgagagtcaaatgaaagaaattaaagccaagctggaggcatccgagagtcggattcgaagacttgaggagaagtaccgcgcctgcaaaacgcatctcaactctgccattcaggagcaacaggatctgtacactcgctcgaagaaacagtgggaggacacaattgaggaggtgcgacgaatcgagaaatctcggaacctcgagaccgagatgactgttcgaaaggccgaagctgtcagagaacagatgatggagaaagttcgccagaccatcgctcagagcaaaagtgaagcagtggaactgtatggcaagataaacagcctgacccagcaggttgaggaaaaagatgccgagctcagtcgggagcgggagtctgtccggttcctgaccgagaaactacagaacatagagtctgtctcaagcagttttgaagcgctctcctcccaggggagggatattctgcagagaatagaagaggaacagatgagggcggaggagaggcagcagcaatccatgaagggaatccgggacaggatcgatgtggtttccgcccgacttgaaacgctctcgaatataatgtcagaacaaccagacatcctctctagtcttcgagaggtacagaaagattcatgggacaatattctagagctgcgaagcgcggcaacggaagctacaagccaattgtcggccgaccttgaacatcaactgggaaaagtctggcagcggctagacagtcaaattgaaacattgactagacagctggcggagaaagcagaagagaatggcatggtatccacgctctataaaaggaatgatgccgagtgtgaggagcatctgaacgagctcgcaatacttagggcgactacggagaagcaagcgaaccaaatccatgaacttgaagcaagcttaatagcgtcagacacggtccatgatgagaacgagaagacgatccgactactggaggcaagaggagcagaggccgagaagctaaaaagagagctcgagtctaaagcagctgctgtggtcgagttgcagagcaaattggatgccaaagagggggcgtatgtgtcagagctgcagaactatagctcgaacattcacgagcttgccaaggcgtttcaagagaaggatcgatctttggcgaccgtggctcatcaagcagcggaaaccgctcgctatgaaacccagctcaagacggagaggatccagaccaaactggaacaatccctccaagagacgaccttacaccgagactctctgattgatcaactgaggaagttggagacaacgatccaagagaaggaacaaaacgaaatgcggcaagccgagacaatctgttcactccgccagagggtggctgtcgaggaagcaaagacacaagcggctgcccagcagctctcacagcagtcagctaatctagaacaagtggagcatcgactgggctcacagatcaaggacttagagacgaaactcagagcagctagcgacctaataagtggcttggagaacgagaatcagcgtcagcacgccagatcggaaacaattgctgccggtctgaaaaactgggcacataaggaaggagttctcattgacgagtttgacaacttgggaaccagcgacagaagcgagaaagagatcagtgactttttgacacacactcttgaactcgttttgtctgctcggcggtcacaaactacgtcccttgagaccaaccctacaggttcggtacttggaatggagaactcgagcttcctcgcaggtcaaaccgccgaggctccgcaggcagctctacaagatcattgtcagaacgaccgggttgagagcgacaatccgagcggcgcaatggcataccaaacaaagagggagggcgacgccgtgggaagaagacatgtcaaagaaccgctgtcgcatgcaccgacgctgcacaacttaagaagggttgtcgtccgcagcccggcaaatgtaccatctgagccagctgcgccatcaatcgaccaagagaaaatgcggagaagagaggcaatgcaaccaaaatcgattatgaagcgggttaccagaagtgcaaccagcaaattgagactggaggactcgagttttgccgcagaagatggcacattcaatataaatgaacaggatgccacacagtcagctgttccacaaaagcaagaagacagtgccagctacgcagaaagtatggcgctgaacacagatacacccgagaacaaggaggcactttctaggcaccccaagaagcgaagacgctcacgaacggcaggttcagaggattgggcgggcagctccacaaacttaggacacggggggaaaggagaatcatccaagcacagtaccgaactaaagactgaacggatggattctagggtttatatttcggttgctacggggcatgaagagaagggagctcggcctcgaaccaacaaatacgattcctacggcgagaagcctgttgctcgtcatccacgaagacattcagacagtggtccccaagacttgccccgaacattgtcggccactaatcctaaacgtctcagccagagacagacgaatgtgcggacgtatggttcgcaaagggcgaccggagaccccttggagctgcagcccttgctgcaatcacaatcagaatcacgatattggcggctgaggtcgaaagccgagtcacaggaaccggtgacttcctaa

SEQ ID NO: 4159 - protein, 1301 aa, Myceliophthora thermophilia
MAFSSPGQARALCSTDQVPATDSLRDSPNGFEICGEDTKAAGIKQQDHLSVASRSPEVNGEDRQGVYVEAGVDHDFVLLEKPSALSKSIDLAGAACSPRSQMPSLGSEPTHDVENNEFKATNVLNRPRTQPSTRDHRDTSHNSDKLDRTEAGREDSQMDRKLSSSDIPCVKRADLSTQDWRTEVENGSPGALSEEGNNCQGVLPALDSASKAKPCASSAPLQSHSNNATSRPRPCWLSQSEPLTATAENAVGYHHNAPVPLTGDPQHSAKKPRDWHQSRMVNRPVREIADVKPIKPVHHARPESRSSNISKSRLVPAARSPCPMVWQRRAKISHEFTTEIAGVINQFTQQQSAAIEEQKAKYHKYIKRLKRELVEESGVITQQMSQIDAQANRIEDLQNSKEHVESQMKEIKAKLEASESRIRRLEEKYRACKTHLNSAIQEQQDLYTRSKKQWEDTIEEVRRIEKSRNLETEMTVRKAEAVREQMMEKVRQTIAQSKSEAVELYGKINSLTQQVEEKDAELSRERESVRFLTEKLQNIESVSSSFEALSSQGRDILQRIEEEQMRAEERQQQSMKGIRDRIDVVSARLETLSNIMSEQPDILSSLREVQKDSWDNILELRSAATEATSQLSADLEHQLGKVWQRLDSQIETLTRQLAEKAEENGMVSTLYKRNDAECEEHLNELAILRATTEKQANQIHELEASLIASDTVHDENEKTIRLLEARGAEAEKLKRELESKAAAVVELQSKLDAKEGAYVSELQNYSSNIHELAKAFQEKDRSLATVAHQAAETARYETQLKTERIQTKLEQSLQETTLHRDSLIDQLRKLETTIQEKEQNEMRQAETICSLRQRVAVEEAKTQAAAQQLSQQSANLEQVEHRLGSQIKDLETKLRAASDLISGLENENQRQHARSETIAAGLKNWAHKEGVLIDEFDNLGTSDRSEKEISDFLTHTLELVLSARRSQTTSLETNPTGSVLGMENSSFLAGQTAEAPQAALQDHCQNDRVESDNPSGAMAYQTKREGDAVGRRHVKEPLSHAPTLHNLRRVVVRSPANVPSEPAAPSIDQEKMRRREAMQPKSIMKRVTRSATSKLRLEDSSFAAEDGTFNINEQDATQSAVPQKQEDSASYAESMALNTDTPENKEALSRHPKKRRRSRTAGSEDWAGSSTNLGHGGKGESSKHSTELKTERMDSRVYISVATGHEEKGARPRTNKYDSYGEKPVARHPRRHSDSGPQDLPRTLSATNPKRLSQRQTNVRTYGSQRATGDPLELQPLLQSQSESRYWRLRSKAESQEPVTS

SEQ ID NO: 4160 - DNA, 1887 bp, Myceliophthora thermophilia
atgaccaccgcggttcggatctgtgtctgcggcgacgaaggcacgggaaagtcgagcctgatcgcctcgctggtcaaggacgtctttgtcgccaacaagatccaatccgttctgccccaggtcaccatccccccaaccagcggcagtcccgaaaatgtcaccaccaccatcgtcgacacctccgcccgcccccaagatcgcacgactctgcgcaaggagattcggaaatgcaacgtcatcctgctggtctactcggaccactacagctacgagcgcgtcgccctcttctggatgccctacttccgctcactcggggttaacgtcccggtggtgctatgcgccaacaagtcggacctcgcaggctcgggcaacacaccgcaggtggtcgaggaggagatgttgccggtcatggccgagttcagggaaatcgactcgtgcattcgcacgagcgccaaggagcagcacaacgtcatcgaagtcttctacctctgccagaaagccgtcacacacccgatcgcgccgctctacgatcacaaggagggccagctgaagcccgcgtgcacggccgcgctgaagaggatcttctacctgtgcgataaggaccaggatggctatctgaacgaccaggaaatgcacgagtttcaggtcaagtcgttcgacaagcccctgtcgcccggcgagctggagaatatcaaggcgaccgtgagcaaggcggtgccaacctccagcaccgagaaggggcttgacctgaacggctttctgcagctgaacaagctgtacgcggaaaaggggcgccacgaaacgatatggatcatcctcaggaagcatcactacacggatagcctcagcctggaggacagcttcctccatccgcggttcgaggtgccggactacgcctcggcagagctcagccccgcagggtatcgctttttcatggatttgttcctgacgttcgacaaggacagcgacggcggactgaacgaccaggaactcgcggctctgtttgctcctacccccggtttaccgccgtcgtgggtcgagtcatcgttcccttcctctaccgtccggaacgaggcaggccacatcaccctgcaaggctggcttgcccaatggagcatgaccaccttcctcgagcccaagacgacgctggaatacttggcctacctcggcttcgaggggccaaacgcgtgggactcgacgaccgccgccctcaaggtcaccaagccgcgaaagcggaggcgcaggccgggccgcgtcgagcgcaacgtggtgctctgctacatcctcgggtctgccgggtccggcaaatcgtcgctcctcgacgccttccttaaccggcccttcgataccctctatcatccgaccatcaaaccgcgccgcgccgtcaacagcgtcgaactgcacgggggcaagcagtgctacctcatcctcgaagagctcggtgagctcgaacccgccatactcgagaaccaagccaagctcgacgcgtgcgatctcatctgctacgcgtacgactcgtcggagcccgactccttctcgcacattgtcgacctgcgcaagcgctacccgcagctggacgacctgccagccatctacaccgccctcaaggccgaccgcgacaagacgacgcagcgcagcgagctgcagcccgacgcctacacggccgcgctcaacatggccgcccccttgcacgtcagcgttacctggaacagtatcagcgagctgttcgtcgccctcgccgaggccgccacgaaccccagcacggcgttccccaggtcggaagagccgcctgatcggaccagcctgtacatggcccttgcggctacttcgtgcgccgccttggcggccttcatgatatggcggcggtcgacgagttcttcagtgtag

SEQ ID NO: 4161 - protein, 628 aa, Myceliophthora thermophilia
MTTAVRICVCGDEGTGKSSLIASLVKDVFVANKIQSVLPQVTIPPTSGSPENVTTTIVDTSARPQDRTTLRKEIRKCNVILLVYSDHYSYERVALFWMPYFRSLGVNVPVVLCANKSDLAGSGNTPQVVEEEMLPVMAEFREIDSCIRTSAKEQHNVIEVFYLCQKAVTHPIAPLYDHKEGQLKPACTAALKRIFYLCDKDQDGYLNDQEMHEFQVKSFDKPLSPGELENIKATVSKAVPTSSTEKGLDLNGFLQLNKLYAEKGRHETIWIILRKHHYTDSLSLEDSFLHPRFEVPDYASAELSPAGYRFFMDLFLTFDKDSDGGLNDQELAALFAPTPGLPPSWVESSFPSSTVRNEAGHITLQGWLAQWSMTTFLEPKTTLEYLAYLGFEGPNAWDSTTAALKVTKPRKRRRRPGRVERNVVLCYILGSAGSGKSSLLDAFLNRPFDTLYHPTIKPRRAVNSVELHGGKQCYLILEELGELEPAILENQAKLDACDLICYAYDSSEPDSFSHIVDLRKRYPQLDDLPAIYTALKADRDKTTQRSELQPDAYTAALNMAAPLHVSVTWNSISELFVALAEAATNPSTAFPRSEEPPDRTSLYMALAATSCAALAAFMIWRRSTSSSV

SEQ ID NO: 4162 - DNA, 1176 bp, Myceliophthora thermophilia
atgcctgagattgcggagatcgctcgagtggtgcactacctgcggttgcacttggttgggaagaaaatcaagaccgccactgcggtagaggataacaatgtttttggcaaagtcggaacgacgggagcggaggtctccagggcactcaccggaaagaaagttctatcagcggggacacaaggcaaatacttctggcttgttctcgatcagccgcctcatcctgtgatgcattttggaatgacaggctggatccacatcaaaggggatcgaaccgcatataccaactattacaagaagatgaagccggaagaaatggatctctggcccccgaaatactggaagttccacctgataaccgagaacccggcagttgaggttgccttcacagatccccgccgctttggccgtgtgcgcctcgtggattgcccgggcgagagcatcaggaagttctccccgctcgtagaaaacggcactgacccggtcgttgacaccgacgttttcactgaggactacctccgagaaaagatgcgctcgcgccatgttccaatcaaggcgctcattcttgaccagaccatcatcagcgggatcggcaactgggtaggcgacgaggtcctctaccaggcgaagctgcatccagaacaatactgcgatgactttagcgatgagcagataacaaggctctacaaatccattcgtcatgtctgtcaatttgccgtcgacaagctcggggattctgaccaatttcccgaggactggctgttccactaccgatgggaaaaaggtcagaaggggggagtgggccatttgcccagcggcgagaagctggcctttctcacagtaggggggaggacaagctgctatgtgccggagatacaaaagaagagtggtcgcattgttcccggcgtcaaggaggaacccatcgagtctgacctggagaaggaaaaacccaagaaagttgttagggcaaaggacgcaattgcagaggacgctatgccgaaaagcaaaaagaggaaggcagaaaaggacgagataccagcaaaaaggagcagagctacccccaagaagtctgcgacgagcgaatcgcaggccactaagggggaagttgcggaaaggataggcagcaatgtcgagcacggcaggcggcggtcaagcaggctgcaaaggaaaaccgcgtga

SEQ ID NO: 4163 - protein, 391 aa, Myceliophthora thermophilia
MPEIAEIARVVHYLRLHLVGKKIKTATAVEDNNVFGKVGTTGAEVSRALTGKKVLSAGTQGKYFWLVLDQPPHPVMHFGMTGWIHIKGDRTAYTNYYKKMKPEEMDLWPPKYWKFHLITENPAVEVAFTDPRRFGRVRLVDCPGESIRKFSPLVENGTDPVVDTDVFTEDYLREKMRSRHVPIKALILDQTIISGIGNWVGDEVLYQAKLHPEQYCDDFSDEQITRLYKSIRHVCQFAVDKLGDSDQFPEDWLFHYRWEKGQKGGVGHLPSGEKLAFLTVGGRTSCYVPEIQKKSGRIVPGVKEEPIESDLEKEKPKKVVRAKDAIAEDAMPKSKKRKAEKDEIPAKRSRATPKKSATSESQATKGEVAERIGSNVEHGRRRSSRLQRKTA

SEQ ID NO: 4164 - DNA, 1566 bp, Myceliophthora thermophilia
atgacagacgtcgcaagccctccggccgaaccccactcgctaatacaagagccggcttctgcactccggtcatccaagccgaagccgaagcgggcgccgactcgcgtctcaatcgtcgctccgaaaggctccaccgaccccgtggttaccagcccgcgctccggctcctcgagcactccaccgggtctgaacgtgacgtcgacaacatggaagaagctcattctgaccatcgatggcggcggcatcagaggatactcatcgctcatcgtcctccgggccctgatgcacgagatcgagcgtatcgagcagtccctcaaaccaccggcctccgcaagcacacataccgaccggataccccgcgaacaaataccggatgaggttttcagagaagggaagtacctgccatgtcactactttgactacatcgcaggcaccagtgttggggggttgatagccatcatgctgggcatgtttgggaacagcgtcgacgactgcgtcaacgagttccaccggcagaacaaggccatccccctcaccgacgacgcctcggtcgtatcatccatcgacttcccgcttgtctacaggcgaagtacctggccgacgaaacggacacgctctttctttgatacgtttgccagattcaccgtcacggcgactggtcgcactctgcccggcagccccgcagccccttcagtctcacgaacatcctcccaagcatccgctgcatcgagcgagttccgcaaggacacgtaccagtgccaaaccctcgcctggtgcgccgaggtcgagacccgccgctcgcgacgcccctacgctttttgcacctacgcggaagaggagggtgaccctgagcagctcatctcgattcccgaagtcgccaaagccatcaccacgccgtcccgctactccttcaagcccttcaagctcggctccggccagttcgtcgacggcagcaagctgatccgcgacccaacgctggaggtcatcaaggagatcacctccctcctggacgagtcggagccgcccatcgacctgctcctcagcctgggcaccgacgagcaccacgcctggttctacgaaaagctgcgatccttggccacctcgcgaggttccccagcctcggccgccaaggacaagccggccatcggcgaggaagaagggcgatcctacatccactatcaccgcttcgaggtgcccgggatcaggctaggctggcgcaagaggttcttcctccgccagatcgaggaggccaccgaggagtggctctcgcgacccgagcagaaggagcgggtcgcaaaatacgcgcagatgctggtggagcggcggcgcgcgagggcggcgaccgcacggtgggagacgtttgcactgggcgtgagatacgtttgtttccacgaggaatgcgccggggagggtgagaagtcggccgaaaacaaccggctgtttacagggaggggggacttctttgatcacctcgacaggaggcacaatctgacgaagagggcagccagagggctggtggatgtggagcaagaattggacaagggcaggcggtttgggtggtgttga

SEQ ID NO: 4165 - protein, 521 aa, Myceliophthora thermophilia
MTDVASPPAEPHSLIQEPASALRSSKPKPKRAPTRVSIVAPKGSTDPVVTSPRSGSSSTPPGLNVTSTTWKKLILTIDGGGIRGYSSLIVLRALMHEIERIEQSLKPPASASTHTDRIPREQIPDEVFREGKYLPCHYFDYIAGTSVGGLIAIMLGMFGNSVDDCVNEFHRQNKAIPLTDDASVVSSIDFPLVYRRSTWPTKRTRSFFDTFARFTVTATGRTLPGSPAAPSVSRTSSQASAASSEFRKDTYQCQTLAWCAEVETRRSRRPYAFCTYAEEEGDPEQLISIPEVAKAITTPSRYSFKPFKLGSGQFVDGSKLIRDPTLEVIKEITSLLDESEPPIDLLLSLGTDEHHAWFYEKLRSLATSRGSPASAAKDKPAIGEEEGRSYIHYHRFEVPGIRLGWRKRFFLRQIEEATEEWLSRPEQKERVAKYAQMLVERRRARAATARWETFALGVRYVCFHEECAGEGEKSAENNRLFTGRGDFFDHLDRRHNLTKRAARGLVDVEQELDKGRRFGWC

SEQ ID NO: 4166 - DNA, 1446 bp, Myceliophthora thermophilia
atgagcgataaagccagcgatcatctaactccttccgcagtcaatctcaagacgcgcgaccatttacgtcgcattgaaaccggaaaaattaccagcacagcaaacggcaacggcagtaccagctttgctggcttcggcgacatggacggcgagcgacggcccctcctgggccaccaggctacctctaccttgcacgcagaacccggcttctggcgccatctgcttatccacgccgagagcactcccggcattgacagcccgaatccctttgtccgctggccggcgcaggtgtggaacgtgaccaagatcactctgtttagctcatggatcaacctccttctagtctttgtgcccttgggcatcgtcgcgggcgagttgaagtggagcgcgccctgggttttcaccctcaacttctttgccatcatcccgctggccgccgtcctctcgttcgcgacagaggagatcgcaggccggctgggcgagacgctcggaggattggtgaatgccacctttggaaatgccgtggaactcattgtcagcattgttgcgttgcgcgccggagagatcgaggtcgtgcaatcgtccatgctcggctccatcctgtccaacctgctgctcgtcctcggcatgtgtttcttcctgggcggcgtttacaacatgcgtggccgggatggccacggccaggaacagagcttctccaccgccaccgctcagacgacgtgctcgctcatgaccctcgcctcggcctcgatgatactcccggccgccctgtacggcattctcagccaagcggaggaacgtaacaagcaggccagcatcctggttctctctcgcggcacctccatcatcctactgttcctctactgtctctatctttacttcgccctacgcacgcacaagaagctctttgaacccgaggccaacgagattactggcgacgacagcgaggaggaacaccagcctttgttggggccctgggcggcggccctcgtcctggtcgtaacgacgctcatcatttcggtgtgcgccgactacatggtggacagcattgacgccctagtggcgacgggcaagatcagcaagaccttcatcggcctcatcctgatccccatcgtcggcaacgcggcggagcacgttaccgcatgcgtggtggccgtcaaggacaagatggatctggccatgggcgtagccatcgggtcgagcatccagatcgcccttcttgtcacgcctgctctggtcatgctcggctgggcgattggccagcccatgacgcttcactttgagacgttcgaaaccgtcgcttttgcgctctctgtcctcgtcgtgacctacaccgtccaagacggcaagtctaattacctggagggtgccatgctcctcggtctctacatcatcatcgctttggccttctgggtcagtccaacagatgctctcggcaaaatctaa

SEQ ID NO: 4167 - protein, 481 aa, Myceliophthora thermophilia
MSDKASDHLTPSAVNLKTRDHLRRIETGKITSTANGNGSTSFAGFGDMDGERRPLLGHQATSTLHAEPGFWRHLLIHAESTPGIDSPNPFVRWPAQVWNVTKITLFSSWINLLLVFVPLGIVAGELKWSAPWVFTLNFFAIIPLAAVLSFATEEIAGRLGETLGGLVNATFGNAVELIVSIVALRAGEIEVVQSSMLGSILSNLLLVLGMCFFLGGVYNMRGRDGHGQEQSFSTATAQTTCSLMTLASASMILPAALYGILSQAEERNKQASILVLSRGTSIILLFLYCLYLYFALRTHKKLFEPEANEITGDDSEEEHQPLLGPWAAALVLVVTTLIISVCADYMVDSIDALVATGKISKTFIGLILIPIVGNAAEHVTACVVAVKDKMDLAMGVAIGSSIQIALLVTPALVMLGWAIGQPMTLHFETFETVAFALSVLVVTYTVQDGKSNYLEGAMLLGLYIIIALAFWVSPTDALGKI

SEQ ID NO: 4168 - DNA, 1653 bp, Myceliophthora thermophilia
atgaaagtggcttttatcgagcacaacgctcccgaaacgcccaggggtggtcgtcagggtgggccagttagtggtgatgggcagtctacactcgacaagggtcagcacttcgcacgcctctccgataaccctgctactccgagttacctgtttaggggccaccagtccatgttcaagcctgaaaacagttttagtaaagcggccaggcgacgcgagaaacacaagaacaggatctcctttacggaaaccagcgagggtgtctgggtgagggtgcaacaccatggtcccccagtcgagtttcaagtctcccctctccgttggaaggcggcacgcctggtctaccacaccaagcacttcgtttcaagactgaggagcccgggcaaggtatccataccatcactaccaccaacatccactgatcgcatccccgccgccgccgccgccgcatcccgccgcaccacaccttcttccccttcctcaacctccgaagcatcatttctcgacctggccgccgccggcccgccgtcttttctcatcgctgctgtttcccacgccctcccccgccccgccgaccgcctcgccccttcttcttcttcttcttcttctgctgctgctgctgctttccctcttgctcggatcttccccaccctcgacgagatgaccagcatcctcctcttgcctttgcacaacagcgtcggcggcagcggcagagcgagcggcagcagaaggagcggcggcggcggcagcagcagcagcagcagcagctaccgcaccgctatagcgtacctcatcgtggccgccacgctgaaccacatccgccggaccaccctgtgcccgccaacggtggggggctaccagtacccgtggtgcgtcatgatggggggcgtcggcgcgaacccgctcgaggacctgcggctggctttgtcgaaccccgacgtgtttgtcggcgccgcgctggccggctacgggacgcggtgggcgctcgtcgcgcgggtggtcggcgggggggtcttggccacgtgggtggtcgagctcgctgtgggcgccttgttgcggaggatcttgttgctgtttgtgacggcggcggctgcaggagcgcaggagaagaagggagttgggtggagcagcgcggggaaagggacgtgggaggtcggcgggtcggcggcgctcaaggtgggctacatgctctggctgctgatgggcgtcgagtgtgcctttgcgaggggcatgaatgcggccgcgtggctcgtggcagggtacaagctgctgcttgttgccggggaagaaggcgtcggacgcgtcgcgttgcggaaggcgatacaagggaaactcctgcaggggtgtttcgtggcctgccacttggtgtactatctgatgggcgggatcggcccggtggtatggcggagcagtgtgtccgcggccagagggcagcctggatcgctgctgacgctcacggggattgtgtggggtgtgtggatgctgctgaggtatcgcagcaccttcttcattgcgttggaggttagtggtttctttatatttcttggctatgttgtatttggcctcggggtgttggcgtgggagttcattgatgacccgctggggttgaaggtgcacactgcccttgatacgcttaacggaatcaagggagagtaa

SEQ ID NO: 4169 - protein, 550 aa, Myceliophthora thermophilia
MKVAFIEHNAPETPRGGRQGGPVSGDGQSTLDKGQHFARLSDNPATPSYLFRGHQSMFKPENSFSKAARRREKHKNRISFTETSEGVWVRVQHHGPPVEFQVSPLRWKAARLVYHTKHFVSRLRSPGKVSIPSLPPTSTDRIPAAAAAASRRTTPSSPSSTSEASFLDLAAAGPPSFLIAAVSHALPRPADRLAPSSSSSSSAAAAAFPLARIFPTLDEMTSILLLPLHNSVGGSGRASGSRRSGGGGSSSSSSSYRTAIAYLIVAATLNHIRRTTLCPPTVGGYQYPWCVMMGGVGANPLEDLRLALSNPDVFVGAALAGYGTRWALVARVVGGGVLATWVVELAVGALLRRILLLFVTAAAAGAQEKKGVGWSSAGKGTWEVGGSAALKVGYMLWLLMGVECAFARGMNAAAWLVAGYKLLLVAGEEGVGRVALRKAIQGKLLQGCFVACHLVYYLMGGIGPVVWRSSVSAARGQPGSLLTLTGIVWGVWMLLRYRSTFFIALEVSGFFIFLGYVVFGLGVLAWEFIDDPLGLKVHTALDTLNGIKGE

SEQ ID NO: 4170 - DNA, 2322 bp, Myceliophthora thermophilia
atgccgccgtattaccacctcatattcgagctgtacgcgacgcctgaccctaccgtgacctcccctgcgagcacgggcaaaggcagcaccagcacccacgacgacatctggattccttcacccggcgcaagcattttcgacgagttaccatcccacccgcggaccaaagcacatacccgacaacagcaacaacagcaacaacaacaacagaggcgcttgcccgagcattggctgcagcggagacccgagcttgacggctactacgattacggactggatcgctcagctgacggtgaaaactatcgttgcgaagagtcgagcagtatttccgttgctgcagtcgccgccgcggccgcgaacacgagagttatcgattgcggcgcgcagcgaggcacgacgcacgacaccacttctgacggcacgtcataccgcgccccgctgaacgaaaggcagtcccgcgcaatacacgaggcggaatcggcgcccagggtcgaggacgggttcggaccggacaaggcagtgcgggactggaggttcgggagggtgcggatcgagagtttcgattcttctgtggacgaggagaagacgggaaagatggcgggaggtcaggaaacgggtgacgccgccgccaccgccgccgccgccgccacgccggctgcgagcttagggccaaacctgggcggcatggggcttgcgacgaaggcgagatacgtccctctcgagacgaagaataccgaggccggatggggcatcgtacatctctatcgggaagggaatgagtccggtgtcgtgaatgggcagtctggggtgtcggacgggcctagccaggcgcagcgtggtggtgacgaggagggtacgattctttgcataccggctgtcccgagttacatgtcgccgagcgacttcctggggtttgtaggagagaagtggcggggctatgttagccattaccggatggtcatgaccagtaccatgagccggtacatggtgctgatgaagttccgagacagcgggagggcgagggagtggcggaaggcgtttgacgggaaaccgttcgacagtgtggagaccgagatctgtcacgtcaccttcatcaaatcaattactgtcgaaacgccaaaccaagccgacccccagagaagatattccgaaggaaacaaggaccgcttctcgcccacgtcgcctctagtcaactccctcaaaccgtttccgccgccgacgccgaacctcatcgagctccctacttgcgccgtgtgcctcgagcggatggatgacactacgggtctcatgacaatactttgccagcatgtgttccactgcacatgtctgcagacatggaaaggctcggggtgcccggtctgccgggcgacaaaccccaagccggcccaaaactacgatccagatgacccatactcgcaacccttcgggtccggcgtagccaacatttgcaacaactgtaactgtacggacgacctctggatttgccttatttgtggcaatgtcggctgcgggcgctacaacggcggccatgccaaggagcattggaagatgacggcccacagcttcagtcttgagctcgagacgcagcacgtctgggattacgcgggcgatatgtgggtgcaccgactgatccgcgacaagggcgacggcaagatcgttgagctaccgcgcaacaacggcaacgaccagcggccagcagcgcctgggggaggaggggtggcgtcgcaagaagacgttgttcctcgtgccaagctcgacagcattggcatggagtacacacacctgctcacgagccagctcgagagccagcgtctctactttgaggagatggtcaacaaggcggcggacaaagcagccaaggcgtctgcggcagccgagtcagcctccaggcaagccgccgaggcgctcagcgaactcgccgcgctgcgcgaggagcaccgcgtgctcaaggacgagacggtgccctcgttggagagagaactctccaaggaaaagaaccgcgcggccaagtcggccgagctggcgcgaaatttgagcaaggcgctgcaggaggagaaagaggtcagcgcggggctgatgaagcgcatcgaacatatcaagacgcagtcggaaggcacggaaaaactcgtggagcagttgcgggcagagaatgaggagctcaaggagatgaatcgggatttgaccatgttcattagcgggcaggagaaactgcgggagatggagaaagaggggatggttgagcagggcgagttggaggagggcatagtgggggtcgccgaaggcagtaaagggagaaggaaagctagggggaagaagaagtaa

SEQ ID NO: 4171 - protein, 773 aa, Myceliophthora thermophilia
MPPYYHLIFELYATPDPTVTSPASTGKGSTSTHDDIWIPSPGASIFDELPSHPRTKAHTRQQQQQQQQQQRRLPEHWLQRRPELDGYYDYGLDRSADGENYRCEESSSISVAAVAAAAANTRVIDCGAQRGTTHDTTSDGTSYRAPLNERQSRAIHEAESAPRVEDGFGPDKAVRDWRFGRVRIESFDSSVDEEKTGKMAGGQETGDAAATAAAAATPAASLGPNLGGMGLATKARYVPLETKNTEAGWGIVHLYREGNESGVVNGQSGVSDGPSQAQRGGDEEGTILCIPAVPSYMSPSDFLGFVGEKWRGYVSHYRMVMTSTMSRYMVLMKFRDSGRAREWRKAFDGKPFDSVETEICHVTFIKSITVETPNQADPQRRYSEGNKDRFSPTSPLVNSLKPFPPPTPNLIELPTCAVCLERMDDTTGLMTILCQHVFHCTCLQTWKGSGCPVCRATNPKPAQNYDPDDPYSQPFGSGVANICNNCNCTDDLWICLICGNVGCGRYNGGHAKEHWKMTAHSFSLELETQHVWDYAGDMWVHRLIRDKGDGKIVELPRNNGNDQRPAAPGGGGVASQEDVVPRAKLDSIGMEYTHLLTSQLESQRLYFEEMVNKAADKAAKASAAAESASRQAAEALSELAALREEHRVLKDETVPSLERELSKEKNRAAKSAELARNLSKALQEEKEVSAGLMKRIEHIKTQSEGTEKLVEQLRAENEELKEMNRDLTMFISGQEKLREMEKEGMVEQGELEEGIVGVAEGSKGRRKARGKKK

SEQ ID NO: 4172 - DNA, 2412 bp, Myceliophthora thermophilia
atgtctaccccttgcgccgtcccccggacggctcccatagccattgcgccaaaaccgccacgcttccctccaagccgccagagcagcatacaccttgattcgttccgcagcggcttcaactcgcccgactcggactcggttagcggcttcccggcccacccttgcgaggcctgcttgaacaggaagacagactgtgccatgggcgacgatgaggaaagctgtgttgcgtgcctggtagccgggaccgagtgctctttgatcgatagccccgcgccacggaagcgcaagttgaacggcgacgttgaaactagcagtagcaagagaagttccccggggcggtctgatatcaggagacggcggcatcagcagcagagcttttcgtgcaccacgaccagcagttccctgaccgaggacatggccaactttggcggtccgaccttgctgaaacgcaccctcggtctccaggcggacagatacagccagtatattgggccaactaccgactttgagccctccctcattaacctctccccctttgacccgcacgacgagagcctcctcgcgcggggtactctcaggcgagtgagcgataatgacaccttcttgctgttgcctgatcacaacactcccggctatgaccacatcctcgaagatgccgacgagatcgagaacatcgtggcaccccatggccgcaagctgatagatctgtattttcgggtcgtgcacccggccttccccatcatccaaaagggcgtgttcctcgaaaagtacgagcggtcccaccgcgaaatatcccccccgcttctctccgccatctatatccttgccatcaactggtgggagcactcggaggatctggccggtcttccccgccctaatgttcgcgagctagagaggctggtgcggaccacgctggctgatgccatgtaccggcccaagctgtcaaccatacaggccggtctgatcctatcgcagcggcccgagggcgaccagtgggctccgacggctcagctcgtcgccatcgggcaggagctgggcctccatctcgattgcacccactggaagattccgccatgggagcgcgggctcaggaagcgcctggcctgggccctgtatatgcaggacaaatggggggcacttgtccacggtcgaccgtctcacattttcgcttccaactgggcggtgcagaacctcaacccgaacgacttccccgacgtcgaatgggacgagaatgacgtcgaggagaggttagagatcgagcgcggccgggtggtgttcgggcagatggtgcggctctcacagatcctctccgagatcctcgagaccttttacaccttggaagcctcccgagcgactgccaatgcgggcgcgcaagcgacacagctgatcctctccctggccaagcctatccagctaaagctcaaagattggtactcgggcctcccggccgtcgtccgcatggactcgtcgcttcagagcagcctccatcagcccaaccgtctctccagcataggctacctccacctggcctactttgccacggagattaccctacaccggcgcatcatccgctccatggataccgcggcgtctgcggcagccgccgcctcgacgccctcgtcttctgccacctcgccaggcgtcaaccctcctccggccggcggtagcagtggcggcgtcgacccctacatccagcatatttgccgcagtgccgccaaggctcgcctcatctcggcgatggactttgtcaaccgcctcacgccctcccacctgcgggcattttggtactttgcctccaaaacgaactttgccctcattggcacctttggctctctgctctgggcgacgtcccccggccgagaagagggcgagtggtaccgccgcaggctgggcgagtaccgctggacgctgtcggtcagctcgaagcccggcgagggtaaggggctgacggaattcgccatgggcatgctggacatctcaacaggcctgctcaagaagctgccggagaagcccttgctgagtcgcagtgagagcggggtggatatcgacgcggcgagacgacaaagcctgttggccttgggagggaccgggatatcggcgagtgacagtgggggcggcggtgtcggtggcagttcgtttgggagcgccgggaggagcgggttgaccatggggatgggcatgcgcagtggtgctgttggcggtggcgctggtggtggtggtagtactcgtgctgctgctgccagcggtgcttttggtggaaggggtatgcctggtccggagagctctagcgggatgcatagtgccgaggcgagcggtgtgcagagtccgctcagcgaggagagcgagagtgaggacgaggagacgtacggcaacttctcggcgacggcgggaatggctggattggcagattga

SEQ ID NO: 4173 - protein, 803 aa, Myceliophthora thermophilia
MSTPCAVPRTAPIAIAPKPPRFPPSRQSSIHLDSFRSGFNSPDSDSVSGFPAHPCEACLNRKTDCAMGDDEESCVACLVAGTECSLIDSPAPRKRKLNGDVETSSSKRSSPGRSDIRRRRHQQQSFSCTTTSSSLTEDMANFGGPTLLKRTLGLQADRYSQYIGPTTDFEPSLINLSPFDPHDESLLARGTLRRVSDNDTFLLLPDHNTPGYDHILEDADEIENIVAPHGRKLIDLYFRVVHPAFPIIQKGVFLEKYERSHREISPPLLSAIYILAINWWEHSEDLAGLPRPNVRELERLVRTTLADAMYRPKLSTIQAGLILSQRPEGDQWAPTAQLVAIGQELGLHLDCTHWKIPPWERGLRKRLAWALYMQDKWGALVHGRPSHIFASNWAVQNLNPNDFPDVEWDENDVEERLEIERGRVVFGQMVRLSQILSEILETFYTLEASRATANAGAQATQLILSLAKPIQLKLKDWYSGLPAVVRMDSSLQSSLHQPNRLSSIGYLHLAYFATEITLHRRIIRSMDTAASAAAAASTPSSSATSPGVNPPPAGGSSGGVDPYIQHICRSAAKARLISAMDFVNRLTPSHLRAFWYFASKTNFALIGTFGSLLWATSPGREEGEWYRRRLGEYRWTLSVSSKPGEGKGLTEFAMGMLDISTGLLKKLPEKPLLSRSESGVDIDAARRQSLLALGGTGISASDSGGGGVGGSSFGSAGRSGLTMGMGMRSGAVGGGAGGGGSTRAAAASGAFGGRGMPGPESSSGMHSAEASGVQSPLSEESESEDEETYGNFSATAGMAGLAD

SEQ ID NO: 4174 - DNA, 1812 bp, Myceliophthora thermophilia
atgctcgacaaggacaacatgaccaccgacacggaggccgacaaggccactcccccgggggcgcagtcgcccaaggtaagagaagaagagacggccggcgacgggggtaagggtaaggatggcgacgaccccttcggggccgccaaggccgggcgcgacaacgccgatgtggtctacccgaccggcatccggctgttcctcatcatcggctcgctctgcctggccgtcttcctcgtcgccctggaccagaccatcatcgcgcccgccctgggcgccatcacggacgagttcggctcggtcaaggacatcggctggtacggcgccgcctacctgctgagcaccacggcgctgcagcccgtgtacgggtccatctaccgcatgttcagcgtcaagtggacctacctgaccgccgtcttcgtcttcgaggtcggcagcctggtgtgcgccctcgcgccctcgagcaacgccttcatcgccggccgcgccatcgccggcctcggcaccgccggcctcttctccggcggcgtcgtcatcctgtcctacaccctgcccctgcgccagcgccccgtcgccttcggcctcatcggcgccatgtgggggatcgccagcgtcgccggtcccctcctcggcggcgccttcaccgaccacgtcacctggcgctggtgcttctacatcaacctgcccatcggcggcgccgccatgctcgccatcttcaccttcctccgcatcaagcaggccgccgacgagcaggggttgcccaccaaccctcctccccgcccgaccctggtccggcgcatcctccgcctcgacctgctcggcaccctcatgctcgtctccttcatcgtctgcctgctgctggccctgcagtggggaggcaccgagtacgcgtgggacagctcggtcgtcatcggcctctttgtcggcttcgccctcatggccatcatcttcgccgccatccagatctggaggggcgaccggggcaccctaccgccccgcctcttcaagaacaaggacgtcgtctgcgccatgttcttttccttcttctttggcgccggcttcttccccttggtctattatctatccttgtatttccaggccatccagggcgactccgccgtcacggccggcatcaagctgctcccgctgctcatctcggtcgtcgtcacctcggtctccgcgggcggcctgatcacggccgtcgggtactacaaccccttcgtcctgccctgcatggtcctcttcaccgtcggcgccggcatgatcacgacctttgatctcgacagcccgctgcgcgtctggttcggctaccaagtcattgccggcctcggcatcggcatcggcttccagacgggcgcgctggtggtgcagaacagcgtgtcgcacgagtggatcccgcaggcgacggcgtgcgtgcagttcttccaggcgatgggcggcgccgtcttcatcgccgtcgcccaggccgtcttccagaacggcctggccgacgagatggagcgcaccgtccccggcctgccgccccaggtcctgatccacagcggcgcctccgagatcccccgcgtgctcgagcgcatgcacgcctcgcgatacctgaccgccgtcctgaccgcctacatgcacggcctgcgcaacacctactacatcaccgtcgcctgcgccggcgccgccttcctcgccgcctgcggcctgagctggaagaagatccagaagcgccggcccgcccccgccgccgcccccgccgagggggaggctgaggaaggggaggccaagggcgttgatgttactaataacggctcggagagcgcaaactaa

SEQ ID NO: 4175 - protein, 603 aa, Myceliophthora thermophilia
MLDKDNMTTDTEADKATPPGAQSPKVREEETAGDGGKGKDGDDPFGAAKAGRDNADVVYPTGIRLFLIIGSLCLAVFLVALDQTIIAPALGAITDEFGSVKDIGWYGAAYLLSTTALQPVYGSIYRMFSVKWTYLTAVFVFEVGSLVCALAPSSNAFIAGRAIAGLGTAGLFSGGVVILSYTLPLRQRPVAFGLIGAMWGIASVAGPLLGGAFTDHVTWRWCFYINLPIGGAAMLAIFTFLRIKQAADEQGLPTNPPPRPTLVRRILRLDLLGTLMLVSFIVCLLLALQWGGTEYAWDSSVVIGLFVGFALMAIIFAAIQIWRGDRGTLPPRLFKNKDVVCAMFFSFFFGAGFFPLVYYLSLYFQAIQGDSAVTAGIKLLPLLISVVVTSVSAGGLITAVGYYNPFVLPCMVLFTVGAGMITTFDLDSPLRVWFGYQVIAGLGIGIGFQTGALVVQNSVSHEWIPQATACVQFFQAMGGAVFIAVAQAVFQNGLADEMERTVPGLPPQVLIHSGASEIPRVLERMHASRYLTAVLTAYMHGLRNTYYITVACAGAAFLAACGLSWKKIQKRRPAPAAAPAEGEAEEGEAKGVDVTNNGSESAN

SEQ ID NO: 4176 - DNA, 525 bp, Myceliophthora thermophilia
atgtcttctccgcgccgccgcatcgagacggacgtcatgaagatgctcatgagcgactatgaggtgactctggtcaacgacaacactccctttgaaggcggcatctggaaagtccacgttgagcttccggaccagtacccgtacaagtcccccagcatcggtttcgtcaaccggattttccacccaaatatcgatgaactgtccgggtctgtctgcctggacgttatcaaccagacctggtcgcccatgtacgatatgatcaacatcttcgaggcattcctgccgcagctgctccgctacccaaacccatccgacccgctgaacggagaggccgctgccctgttgcttcgggatcccagtctttatgacgccaaggtcaaggactacgtccaaaggtatgcgtcaaagaatgcagtggacgacgccggagccgagagcgaagacgacgacgacctttcctcggtaggaagctacaatgacgacgaagaagaggcgcagcccgccggccagatggacgatgtatga

SEQ ID NO: 4177 - protein, 174 aa, Myceliophthora thermophilia
MSSPRRRIETDVMKMLMSDYEVTLVNDNTPFEGGIWKVHVELPDQYPYKSPSIGFVNRIFHPNIDELSGSVCLDVINQTWSPMYDMINIFEAFLPQLLRYPNPSDPLNGEAAALLLRDPSLYDAKVKDYVQRYASKNAVDDAGAESEDDDDLSSVGSYNDDEEEAQPAGQMDDV

SEQ ID NO: 4178 - DNA, 3252 bp, Myceliophthora thermophilia
atgtatatcctcaagccttcatggctacgccatagtggggagcaaaaggactttgaagtctacagctgccacatctcccccgatggctcaaggctagctaccgctggtggagatggccacgtccgaatctggtcgaccgaggccatcctcaacgccgataaacctgactccggcagaccacgacagctctgtcacatgagccaccatttaggcactatccactctgtccgcttctctccgaacggccgttaccttgcgtccggcgccgacgatagagtgatttgcatctaccagctcgacagcaacccgccttcgcacgccgcgaccttcggcacaaacgagcccccgccggtcgagaattggaagacccataagcgcctcgtcggtcatgacagcgatgtccaggatctcgcctggtcatacgataactccatcctcgtctctgtgggcctggattcgaaggtggtggtgtggtcgggacacacgtttgagaagctgaagacgatcgctgtacaccagagccacgtgaagggaatcacgttcgacccggcaaacaagttcttcgcgaccgcgggcgacgaccgacacatcaagatcttccgcttcaccccgccaccaccaaacgcgactcagcatgacatggttaacaactttgtcctcgagacgacgatcagcgcaccattcaagagctccccgctcacgacctacttccgtaggtgcagctggtcaccagacggcaaccacatcgcggccgccaacgcggtcaacgggcccgtgagcagcgtcgccatcatcgagcgcacgaggtgggacagcgagatcaacctgatcggccacgaggcccccaccgaagtctgcatgttctctccccgcctgtttcacacccagaaacccggcgagaacggatcggacaagggcaattccagcttggtaactgtcatcgcgtccgcagggcaggataagacgctgagcatctggaacaccaacacgtcgagaccggtcgtcatcttgcaggacgtggcgtccaagtccatttccgacctcgcttggacccctgatggccagaccctgttcgcctcgagtctggacggcaccatcctcgccgtcaagttcgagacgggtgagctcggctgggtggcaacctcggaggagaacgacaaggcgctgcagaagtacggtggatcgaggaagggcatggggactgccgaggatgtggatgggctacacctcgagaaccacagcaaagaaggggagctgcgcggggccgagtctaggatgggcgctctgatgggagacttccagaccgaggatgacaaaggcagaccggtttcgaccaacggcaccaagtcgtcagccaagaacggcgagacaaacggcgccccggagcaaaaacagaaggaagaaggaggccccaaggcggcaccgggggaggagagcgcagagaaaacggccgaacggatagcggagctgaagtccagagtacaggtcaccaaggacggcaagaagagggtcgctccgttactggtctcctcatccgctaccggtctcttatctctgccccagtcgcagctggtcggcgccaaatcgaccaaaccagcacaaagcgatacaccacaagcaattcttgacctttccaaaccgtttcacggcttgcccaaaggcggcatcgccgcgctgctcttgggaaacaagcggaaggccgtcgcactggagggagaggaagaggacgagccagcggccaagcggccatcgaacggccccgtaccggtcctggtcgacactcccgaggggttggagccccctccgccgactaccccggcccagggtgtggtgccgacaccggaattcctccggccggccgtcatcaaccccgctatttcggtttcccaggtcaggctggccgtgcccaaggtgcgctcgcacatcgtccggccgctccagcggggcgtccttcagggcgagtccaccctcgacgaggcgtccagggtccccgagaacgtcatcctcgaggccaggaaccccgtcaagccccgcgagccgtctcacatcaccgcctcgaaacgcggagcacggctgtggcaggatttccttccgcgagccatcctcctcgtgaccggaagcaaacacttctgggcggccgcctgcgaggacggctccctgcatacctggacccctgccggccgcaggctcctcaacggcatcatcctcgagtcccagcccgtcattctcgagtcgcgagaacactggctcctctgcatcacctcggtcggcctctgccacgtcctcaacatgaagaccatgtccgccccgcacccgcccgtgtcgctcgcccccatcctcgacatcgccgtcacctctctctccccggacggcgccaccccggcgcccggtgtcacctcggcgcacctcaacagcacgggcgccatcgtcgttaccctgagcaacggcgacggcttctactactcctccaccttgtacgcctggcagcggctgtccgagtcgtggtgggcgctgggcagccagtactggaacagcaacgactcgtccatcagcgcgctgtcgtcgaccgccgtcgggccggtccccacgacgacgacgacgacgacgacgatgaccaccaccaccactactactaccaccaacagcacgacgggggcgccctccgacaagggcgcggcggccgacgaggtcaacgtctcggccggcattatcccgttcctcgagcgccacacgacgaccgagttcctgctcaagggccgcgccttcaccctgcagcggctcatcaagacgctgctgtccaaggacggcttcgagggcttcgagagcaccgtcagcgtcgcgcacctcgagaaccgcatcgcgggcgccctggcgctcggcgcccgcgaggagttccgcctgtacctgttcatgtacgccaagcgcatcggcgccgagggcttgcgaggcaaggtggaggagctgctgaactccctcgtcggcggggtgttgcaggagaaggggagcggcggcggcggcggcggaggggaggggaaggggtggttcagccgggaggagaagctgtgcgggtgggacaggagagagctgctgaagggggtggttctcatccttggcaaattccgcgacctccagcgcttgacggtgcagtacgcccgcatcctgggattgaccgccggctgggaagaagaaggtggcgaaggcggcgaaggcggcgagaacgaagcctcggagagaatgcaagtggaacagtga

SEQ ID NO: 4179 - protein, 1083 aa, Myceliophthora thermophilia
MYILKPSWLRHSGEQKDFEVYSCHISPDGSRLATAGGDGHVRIWSTEAILNADKPDSGRPRQLCHMSHHLGTIHSVRFSPNGRYLASGADDRVICIYQLDSNPPSHAATFGTNEPPPVENWKTHKRLVGHDSDVQDLAWSYDNSILVSVGLDSKVVVWSGHTFEKLKTIAVHQSHVKGITFDPANKFFATAGDDRHIKIFRFTPPPPNATQHDMVNNFVLETTISAPFKSSPLTTYFRRCSWSPDGNHIAAANAVNGPVSSVAIIERTRWDSEINLIGHEAPTEVCMFSPRLFHTQKPGENGSDKGNSSLVTVIASAGQDKTLSIWNTNTSRPVVILQDVASKSISDLAWTPDGQTLFASSLDGTILAVKFETGELGWVATSEENDKALQKYGGSRKGMGTAEDVDGLHLENHSKEGELRGAESRMGALMGDFQTEDDKGRPVSTNGTKSSAKNGETNGAPEQKQKEEGGPKAAPGEESAEKTAERIAELKSRVQVTKDGKKRVAPLLVSSSATGLLSLPQSQLVGAKSTKPAQSDTPQAILDLSKPFHGLPKGGIAALLLGNKRKAVALEGEEEDEPAAKRPSNGPVPVLVDTPEGLEPPPPTTPAQGVVPTPEFLRPAVINPAISVSQVRLAVPKVRSHIVRPLQRGVLQGESTLDEASRVPENVILEARNPVKPREPSHITASKRGARLWQDFLPRAILLVTGSKHFWAAACEDGSLHTWTPAGRRLLNGIILESQPVILESREHWLLCITSVGLCHVLNMKTMSAPHPPVSLAPILDIAVTSLSPDGATPAPGVTSAHLNSTGAIVVTLSNGDGFYYSSTLYAWQRLSESWWALGSQYWNSNDSSISALSSTAVGPVPTTTTTTTTMTTTTTTTTTNSTTGAPSDKGAAADEVNVSAGIIPFLERHTTTEFLLKGRAFTLQRLIKTLLSKDGFEGFESTVSVAHLENRIAGALALGAREEFRLYLFMYAKRIGAEGLRGKVEELLNSLVGGVLQEKGSGGGGGGGEGKGWFSREEKLCGWDRRELLKGVVLILGKFRDLQRLTVQYARILGLTAGWEEEGGEGGEGGENEASERMQVEQ

SEQ ID NO: 4180 - DNA, 1605 bp, Myceliophthora thermophilia
atgacaacatctgcacccccactgacgatgcggccgtacatgggcatgtcaaattccgatcagcgcgtcgagatctggtcgccggcggctcggatggctgccgggaccgctccagccggtcggttcgtccaggcccacgaggcggcgagacaaaagcaggaacgcggggggacgcagatcctggtcggtctcccaaggctttccgtcatcatgaagtcctcacttgcccacctgataccggcggcctccctgggccacgccatctccatctccctgcccccgctcattccttcaatccccggcgtcacggagcccctgaacgacctggctccgccgctgcccatcctgcaggttcccacacccccgctggacagccctccgttcgaggccagcgatatcaagcccaagaagattggctacttctggaccggcgccggtgacaagaagcacaaggacttcctcgccacctacagtctcgatgacgacacgttcggcacgcttctgtgggttaccgacgtgcccactagcggaaatgatcctcaccaccttgggccttcgcttgacggcaagaccctgattgggggcggtctcctgtccctgctcaagactcaggacactgccttctactttgacacgtccaacccgtaccggcccaagtttctcaagagcaaccgggctctcctctcgtccatcacggacgagatccgcgccaaacccgacggcggcttcttcatcacctacatgggctcggccgtcggcacctcccccggccgtctggtcgagaccgatgccgagttcaacgtgatccacgagtggcccgaggacgtagagggcacgctgaacatcctcggccagcagttcaacccccacggcctgagcatcgactgggagaggggcaacatcctcacctccgactttgtggagcccatcagcatcctcaagcccagcctcggcatcaagaaggccaacacgctccgcctgtggaatctcaagacgaagaagatcctcaacaccatcaccattccgaatggcggcggtatccaagacgtcaagcacattcctggtaaccccgagggtgccgctatcgcgaccgcagtccaaaccggccaagtctggatcatctacccccagcgcaaggacgccaacggaaagcccggtgttgccgagctgctgtacgacctcggtcccaaggctcgtgacaccacggccatctactccgacctcacccaggacggccgcttcctctacctgaccctgacgacggccaaccacatcgccgcgctggacatcagcgacctcggcaacgtcaagcggctcgacgacccggacgaggaccagccgacgatcgggccgcactacgtcaaggtgacgccggaccagaagcacctgctcgtgacggactacttcgtccagacgggctccatcggcctcatcaacacccccgccgacttcaaggccctctacatcgacatcctcgacgacggcagcctcgccttcaaccgctccatcgacttcagccgcgacttcgccaaccgcggcggcggcaagccccactcctccgtcgtctttgacctgacggatcccgagcaccctctctactactaa

SEQ ID NO: 4181 - protein, 534 aa, Myceliophthora thermophilia
MTTSAPPLTMRPYMGMSNSDQRVEIWSPAARMAAGTAPAGRFVQAHEAARQKQERGGTQILVGLPRLSVIMKSSLAHLIPAASLGHAISISLPPLIPSIPGVTEPLNDLAPPLPILQVPTPPLDSPPFEASDIKPKKIGYFWTGAGDKKHKDFLATYSLDDDTFGTLLWVTDVPTSGNDPHHLGPSLDGKTLIGGGLLSLLKTQDTAFYFDTSNPYRPKFLKSNRALLSSITDEIRAKPDGGFFITYMGSAVGTSPGRLVETDAEFNVIHEWPEDVEGTLNILGQQFNPHGLSIDWERGNILTSDFVEPISILKPSLGIKKANTLRLWNLKTKKILNTITIPNGGGIQDVKHIPGNPEGAAIATAVQTGQVWIIYPQRKDANGKPGVAELLYDLGPKARDTTAIYSDLTQDGRFLYLTLTTANHIAALDISDLGNVKRLDDPDEDQPTIGPHYVKVTPDQKHLLVTDYFVQTGSIGLINTPADFKALYIDILDDGSLAFNRSIDFSRDFANRGGGKPHSSVVFDLTDPEHPLYY

SEQ ID NO: 4182 - DNA, 2286 bp, Myceliophthora thermophilia
atgggcaatcgcgctgcgagtgactttgtgccaggctctctcaccttaatcaagaacaatcgctccaacgattccgtcttacactccgtttcttttggcctgcccgccgaatctcgccaagacatgggcatatctagcagccaaagctcgcccggatccgaccgcaatggcgagaaggctgctggtcaaggaaaattgctagcgctctcagacattgtcaagacaacccgtcgacgccgcttggctggcctcgttgctaacccattccgtagcagcccttccgagactgccgccgccaaaggcagtaccgtgacgggccgcggcagcgtggcggccaagcggccaagccagagggaggttgcgcacccgcccgacatcgataggattcgtgagatacccggccagtttcttcgggagctccgcggcagttccgagaagggtcggcccggtgaggagagcacttccttttggatcagcaaagagttggaggaaaagctcgcctcgtactccgaaaagaaagcgcaggagtatagtgatctgcgccaaaagggcaccgagtatgagcgctcgctggggtttgactctgcctgtaccaagacggcaaagcccatcgaggttaaggccaacgcggtctttcagcatctcaaaaagaacgacattgctcgtttctatgagacggcgcccaagaagcgtggctaccgcggccaggagcacccacggttctacggtgatcacttcctctccaatgcagacctcatcgaacaaacacaactcttcgccctgtgtcgggccatgcccaagggcgcacatctccacattcacttcaactccaatctcccccctagtgttctgctgggaattgccaaggacatgaaacgcatgtttatctggagcaacatcccccttgatcggccagaagcgtatgatctctgcaggatacagttcagcatcatgaacgagaaagcagtcgaggaaagaggggcagggaaccttttccacaaagactacggaggcgggaccgtgatgcagtttcaggagttcagagaggcgtatcccgggggcccagaagcggccgatgcgtggttacaaagcaagctggtctttcaggaggaagaagcccataaccttcttcagaccgcggaaggagcatgggaaaagttcaatgcccgaacccagatgatgaagggtctgttcaactacaagaccgcatataggaggtacactcggcagtgcctcgacgagttcgtcgccgacaatatccagtatgcagagatcaggccaaacttcatgtcgtcgaaccaagtatgggaggacgacggctcctcccggatcgacaatgtcgggatcatgaacctgatcatcgacgaatacgaagccttccaaaaggaccatcagcgtcggatcctgaagggcctgaagatcatctactgcactccgcgttcctttggcgaggagcaggtcggcgaggcattaatgcagtgcttccaattcaagacggacaagaaattttcaacgtacattgctggctttgacctagtgggcgaggaaagcaaaggcaagcctctcaaggccttcacccgacaattcctccagttccaggccctctgcaaggccgccgacatcgagatacctttactcctccactgcggtgagacactcgacatcggcaccgacaccgacggcaacctcctggacgccttgctgctcggcgccaagcgcatcggccacggttttgccctgccgcggcacccctacgtcatgggcgagatgaagcagcgcggcgtctgcgtcgaggtctgccccatctccaacgaaatcttgggcttgacgccgaggataagcggccactcggtgtacaacctgctggcgaacaatgtaccgtgtaccatcagtgcggataatgggactctgtttcggtatgaccctcgctcccccttcccccttcccctcgcaacatatctccccactcgtcacccccgactcttgggctcacacgcctgtccatgctgcagatcccgcctctcgcacgacttttaccagatcattgcgggtaagccggacatgacactccacggcctgcgccaggtggtcgagtggagcatcgagcactcgtgcatggagcccgagctgaggagcgaggtgcgcgggagctgggagaagatgtgggacgagttctgccagaggatcgtcgacggcgagtttacgctcaaggatggagccggcgagatggcagcggagggagacgtggccgccgacaagcctgtcggggggttgcctcctgtatga

SEQ ID NO: 4183 - protein, 761 aa, Myceliophthora thermophilia
MGNRAASDFVPGSLTLIKNNRSNDSVLHSVSFGLPAESRQDMGISSSQSSPGSDRNGEKAAGQGKLLALSDIVKTTRRRRLAGLVANPFRSSPSETAAAKGSTVTGRGSVAAKRPSQREVAHPPDIDRIREIPGQFLRELRGSSEKGRPGEESTSFWISKELEEKLASYSEKKAQEYSDLRQKGTEYERSLGFDSACTKTAKPIEVKANAVFQHLKKNDIARFYETAPKKRGYRGQEHPRFYGDHFLSNADLIEQTQLFALCRAMPKGAHLHIHFNSNLPPSVLLGIAKDMKRMFIWSNIPLDRPEAYDLCRIQFSIMNEKAVEERGAGNLFHKDYGGGTVMQFQEFREAYPGGPEAADAWLQSKLVFQEEEAHNLLQTAEGAWEKFNARTQMMKGLFNYKTAYRRYTRQCLDEFVADNIQYAEIRPNFMSSNQVWEDDGSSRIDNVGIMNLIIDEYEAFQKDHQRRILKGLKIIYCTPRSFGEEQVGEALMQCFQFKTDKKFSTYIAGFDLVGEESKGKPLKAFTRQFLQFQALCKAADIEIPLLLHCGETLDIGTDTDGNLLDALLLGAKRIGHGFALPRHPYVMGEMKQRGVCVEVCPISNEILGLTPRISGHSVYNLLANNVPCTISADNGTLFRYDPRSPFPLPLATYLPTRHPRLLGSHACPCCRSRLSHDFYQIIAGKPDMTLHGLRQVVEWSIEHSCMEPELRSEVRGSWEKMWDEFCQRIVDGEFTLKDGAGEMAAEGDVAADKPVGGLPPV

SEQ ID NO: 4184 - DNA, 1155 bp, Myceliophthora thermophilia
atgacagagcacgaaggcgccgccatctcggccgagaccctctccggccaagtactccacatcccggatctccgcccggcgttcgcgtcgtggaagcaaggcgtcaaccccaaccacgagtgggtgaagactgccgtggaggagcggttggaggacctgatcgagaacaaagaggtcctggccaaggtgaaggcgactgatatcacgctctttgcttctggcttgttcccgaccgcatctgccgaggacctgaagacggccgcattgtactacgtctggctcttcctgtgggacgatgtcatcgacggcgcggaagctgatggggccggcgatgcgctggctgcagaggcctactgccggcggtctgtcgccttcgtgaggcgcgctctcggggtcgacggggccgagactgccccgtgcccggaggagggggcgccaacgcgcatctgtgagagcttcggcgacgtgggcaggcggatcgtcgaacggggttgccgggccgagcagaggagggggctgtttgagcagttgagggagtacatggagggttgcgtgacggagtacaagtggcgattgtcggggagggtgccgagcgtggagcagttctactcgtggcggctcaagacgtcgtcggtggatgccatgctggaactttgccggatcatcaacaatatcgatctccccaatgatattctcgggtcggaagagcatgcagccatgggccgctcggtgaacaagctgctgattatcatcaacgagttattttcacttagaaaagagctgaaagatggctcattcggaaacctcgtgcccgtcacaatgcgtgctctcaatttggatctcgagggcgcgacgcaagctttgatacaggatatccacggctccatcaaggattttaacgacaatgcctcggccatccgctccaggatcgtgccggagcagggtgtcggggtcgcggagcagttgcggcggctaaccgagtcgtaccaggcgattgccacgacggtgctcaacttttccatccagagcccgcggtatgggctgtccaaactcggcttctcggcgcgctccggtgtccatggctccggctggcacgacctgaaaccggacggccaaaaggcccacatccttctcgcaggaactcgtacagcatga

SEQ ID NO: 4185 - protein, 384 aa, Myceliophthora thermophilia
MTEHEGAAISAETLSGQVLHIPDLRPAFASWKQGVNPNHEWVKTAVEERLEDLIENKEVLAKVKATDITLFASGLFPTASAEDLKTAALYYVWLFLWDDVIDGAEADGAGDALAAEAYCRRSVAFVRRALGVDGAETAPCPEEGAPTRICESFGDVGRRIVERGCRAEQRRGLFEQLREYMEGCVTEYKWRLSGRVPSVEQFYSWRLKTSSVDAMLELCRIINNIDLPNDILGSEEHAAMGRSVNKLLIIINELFSLRKELKDGSFGNLVPVTMRALNLDLEGATQALIQDIHGSIKDFNDNASAIRSRIVPEQGVGVAEQLRRLTESYQAIATTVLNFSIQSPRYGLSKLGFSARSGVHGSGWHDLKPDGQKAHILLAGTRTA

SEQ ID NO: 4186 - DNA, 945 bp, Myceliophthora thermophilia
atggcagccggaacccaggtcattgccaactctggccacgacgacatgattagaggcaaagggaatctgacgaactaccagcacgatgcagtcctcgactactacggccggaggttagcgacctgctcctcggaccgcaccatcaagatctttgagattgagggcgagacacaacggttgaccgagacgctgaaagggcacgacggggcggtttggtgcgtctcgtgggcgcatcccaagtacggcaacatcctggcgagcgcggggtacgacggcaaggtgctgatctggcgggagctgaacggggcgtggcagcgcatctttgactttgcgctgcacaaggcgagcgtcaacgtggtgtcgtggtcgccgcacgaggccggctgcctgctggcgtgcgcctcgtcggacggcaacgtgagcgtgctcgagttccgggacaacagctgggagcacagcatcttccacgcgcacggcctcggcgtcaactcggtctcgtgggcgcccgccaccagccccggcagcatcgtcagcagcaagccggggcccaagtcgacgggcaaccggcgcttcgtcaccggcggctccgacaacgcgctcaagatctgggcctacgaccccgccaccaacacgtacaagctcgagcgcgagcccctgacgggccacaccgactgggtccgcgacgtcgcctggagcccgacggtgctgcagaagagctacatcgccagcgcctccgaggaccgcaccgtgcgcatctggaccagcgacccggccaacccgctgcagtggaactgcaaggtcctcaactttgacgccgccgtctggcgcgtcagctggtcgctcagcggcaacgtgctagccgccagcggcggcgacaacaaggtgaccctgtggaaggagaacctcaagggcgagtgggaatgcgtcaagacgatcgaggagtga

SEQ ID NO: 4187 - protein, 314 aa, Myceliophthora thermophilia
MAAGTQVIANSGHDDMIRGKGNLTNYQHDAVLDYYGRRLATCSSDRTIKIFEIEGETQRLTETLKGHDGAVWCVSWAHPKYGNILASAGYDGKVLIWRELNGAWQRIFDFALHKASVNVVSWSPHEAGCLLACASSDGNVSVLEFRDNSWEHSIFHAHGLGVNSVSWAPATSPGSIVSSKPGPKSTGNRRFVTGGSDNALKIWAYDPATNTYKLEREPLTGHTDWVRDVAWSPTVLQKSYIASASEDRTVRIWTSDPANPLQWNCKVLNFDAAVWRVSWSLSGNVLAASGGDNKVTLWKENLKGEWECVKTIEE

SEQ ID NO: 4188 - DNA, 2979 bp, Myceliophthora thermophilia
atgggacccccagtgccgagtcatccgattctcaatggcctcaacgacgcgcagcgccgcgctgtcacctcggaggcggcgacggtggccatcctggctggaccaggaagcggcaagacccatacactgacgactcgagttgtctggctggtcgatcaagtgggaatccgtccccaggatgttatcgttgctacttttaccgtcaaggccgcccgtgagatgaaggagcgcatcggcaaggccctcggcaatggcagggagaacaaactcatcctgggcacattccacagcatcgcccgccgctatctcgccgcgtacggacggcacattggtctcagccagaactttggcattgccgacgccagcgactccagcgagatcatcaagcgcatctgcaagaggctgcagctcgcagtcgaccctgctggtgcacgggcctggatcagcaagaagaaatccaagggcaccgaggccccctccaagacgacccgccaggaggcgagcaaggtggcagggctgcaggagctcgacacctgctatcgcgagtatcagaaacatctcgagacctctaatctcctagactacgacgacctcctgatcaaatgtgtcgagctgctgcagaaattcccgtcctgcgtctccaacatccagacggtgctcatcgacgagtatcaagacaccaacggggtgcagtacgacttgatgaagctctttgctcagcatcggaagaggatcacaacggtgggagatccggaccagagcatctacgggtggcggtcggccgagatcaggaatctgtggaaaatgctccgcgagtacccagagacggaagagatagcccttgaggagaactacagatcctcacaagcgattctcgacttgtcactcgaggtcatcaagcaggatcagaagcggtataagaaggtcctcaagcccacccacaacaaaggctcccgcccggtgctccgccgtttgaagagcgcctccgccgaagctgactggattgtgtcggagatcagaagggtgctcgtcatgtccggaaatatgttgacacacaacgatgtagccatcttgctgcgctcggcagccctttcgaggcacatcgaggcttcccttggaaaggcgggcatcccataccgaatggtcggcggcttcaagttctacgaacgtgcggagatcaagactctcatcgactaccttcgcgtcatccatcaacccaaaaataacgatgcgctcgcaaacattgtcaacgtgccgaggcgcggcatcggcgaggctaccgtcaaagcactactcgaagaggccgagacatctgcgctcagtctctgggacgtcttgacgaagcattgccgaggggatcgaaaagcagagacaaagatcacaaagcaggctgagcagcagctcagtggcggcttgctgcgcccgctacaggatatcaggagacgggtcgcagaagcctgcgagcccaacgggaggccttttgggctagtcgagatgattgagcatcttctcaccaggttgagctttgaggaatacctgaagaagaaatatccggatcccgatgaccacgggcagaggtgggctaacgtgcaagaatttctcggtcttgccgctgaatttgagcgcgacatggaccggtcgaacgaagacgacctccctgaaattgaggggcttgatcagacgagagagaagggagtcctgccacgcttcctagccaacgtggctctcgcatccgatgttcagaccgaggacaacgggcaagagagccggcccttggtgaccatctccacaattcacgcggcaaaaggccttgagtggcccatcgtctttgttcctgcggtctacgacggctccattcctcacactcgagccgaggacggagacgaggagcgaaggttgctgtacgtggccatgacgagggcccaaagcctactgtatcttagttgcccgctttttagcgccaatggcaacggggagcgcaacagactgtcgcctttcgtcgatcctgtccgccgcttcttcttgaacaaaggcccgtgccttgatcggcgggtcatggccgagattgccaggatcctccgccgagaactgccagcggaaaggcttatttacgaaagaatgcctgctatgttcagtatggaggacgacctgtttccggtagatcctgaagaggaatcagagatgacggagcacggcttcgaccgcgaggatggtcgctatagagacaatgcagtccgggcaaaaagacctcgactacatgggccaataggaggacaagacagcgacgaggaggttccctggaagcagtacatgactcccatggagcaaatatctacgttctccgtcgccccatttcctggttttgtcagtgtgggggcccatcaagctgctatcactgctgctaacgccgccgccacgacggcgccgaaggccgagaagagcaagccatcagcgggcaaacgacccccagatcagaagagtatcatagggttcatcaagatccattctgtttctgctcgtccgcaatccggagcggcatcagcgtccaagccgagcagtgcagtttcagtacggagtgggcttgttgaagtgcaacccaaggctgcgtcaccacagccggcgatcgacccgaatctcgctggtcatagactaggatcgggaaagttgatgtctcgcccggcaatcccaagcgaggaaacctcgatcaaaaggaaacagtacgcctacttttccagctcgccccccgggccaacggctgcggaggagacgaatcgggagggcagcaacacgacagggctggatgacgataatgagccgccgccgggaggcattcgcccggcgtcctctctgcatgcgacgtcggctggactcggcggcatgttcaggaggccccgaggccttggtcagcagtctctcgctccaatggagaggctgcggaggccgttcaaaccgttgtctataaacaagcgtcaggactag

SEQ ID NO: 4189 - protein, 992 aa, Myceliophthora thermophilia
MGPPVPSHPILNGLNDAQRRAVTSEAATVAILAGPGSGKTHTLTTRVVWLVDQVGIRPQDVIVATFTVKAAREMKERIGKALGNGRENKLILGTFHSIARRYLAAYGRHIGLSQNFGIADASDSSEIIKRICKRLQLAVDPAGARAWISKKKSKGTEAPSKTTRQEASKVAGLQELDTCYREYQKHLETSNLLDYDDLLIKCVELLQKFPSCVSNIQTVLIDEYQDTNGVQYDLMKLFAQHRKRITTVGDPDQSIYGWRSAEIRNLWKMLREYPETEEIALEENYRSSQAILDLSLEVIKQDQKRYKKVLKPTHNKGSRPVLRRLKSASAEADWIVSEIRRVLVMSGNMLTHNDVAILLRSAALSRHIEASLGKAGIPYRMVGGFKFYERAEIKTLIDYLRVIHQPKNNDALANIVNVPRRGIGEATVKALLEEAETSALSLWDVLTKHCRGDRKAETKITKQAEQQLSGGLLRPLQDIRRRVAEACEPNGRPFGLVEMIEHLLTRLSFEEYLKKKYPDPDDHGQRWANVQEFLGLAAEFERDMDRSNEDDLPEIEGLDQTREKGVLPRFLANVALASDVQTEDNGQESRPLVTISTIHAAKGLEWPIVFVPAVYDGSIPHTRAEDGDEERRLLYVAMTRAQSLLYLSCPLFSANGNGERNRLSPFVDPVRRFFLNKGPCLDRRVMAEIARILRRELPAERLIYERMPAMFSMEDDLFPVDPEEESEMTEHGFDREDGRYRDNAVRAKRPRLHGPIGGQDSDEEVPWKQYMTPMEQISTFSVAPFPGFVSVGAHQAAITAANAAATTAPKAEKSKPSAGKRPPDQKSIIGFIKIHSVSARPQSGAASASKPSSAVSVRSGLVEVQPKAASPQPAIDPNLAGHRLGSGKLMSRPAIPSEETSIKRKQYAYFSSSPPGPTAAEETNREGSNTTGLDDDNEPPPGGIRPASSLHATSAGLGGMFRRPRGLGQQSLAPMERLRRPFKPLSINKRQD

SEQ ID NO: 4190 - DNA, 4314 bp, Myceliophthora thermophilia
atggcaagttccggccaagacaccaaggatgagtcggctccctctcgtcgaacgagagcccgacccctgacaatgcctggcagacctactattaacatcgacaccacggccgtgagccccagtccggcggccctcgagacggatgccgaagctggcactcaagccgcgtccaccccgaccgctgcgcacagcagcccgaccgacccttcatcgagctcccacaagcgcagcctgtcccaaacgcggcccgaggtgcaggccgcaaaggcctccgatgccagagacagccggcctaccagcccgcacaatgtcctcagccctttctctttccgtgggcccggcccaaatcagggcttcctcgccgttccgaacgctcaacgctcccgccagaactctctcaactcgacagacgatgcgcgctccgtcgcttcctcccaggacgttaccgtcattggcggcggctcgtccaccggggaaaagagtacctccccgtttggcgaccgatcggacaactaccagatcatgaatgacaaggacgccctcaagccggaccaggggaaggaagcagacttcgtggtggaggataacccgttcgccttcagcccgggaatgctagggaaaatgtttgatccaaagagcctgtcggccttctataagctcggcggccttgcgggtatcgagacggggttgcggaccaaccggaccacgggcctgagcgccgacgagaccgcccttaccggcaccgtctccttcgaggaggccacctcccgccctccggagaaggccctgaccgaggctgtttcccctccttcgcccgaccaccacaggaagcccgaccccaacgagcccttctcgtcgaggaagcgcgtcttccgcgacaacaggttaccggtcaagaaaggcaaaaaccttcttcagctcatgtggattacgtacaacgacaaggtactgatcctgctgtcgatcgccgccgttgtctctctcgcgattggcctctaccagacctttggccaggagcacaaggccgatgatcccgcagttgagtggatcgagggtctcgccatcattgtcgccatcttcattgtcgtcatggtcggctctctcaatgattatcaaaaggagcgtcagttcgccaggctgaacaagaagaaacaagaccgcctggtcaaggccgtccggtccggcaagacggtcgagatctccgtctttgacatcctggctggcgatgtcttgctcctcgagcccggtgacatggttcccgtggacggcattcttatcgagggcttcgacgtcaaatgtgacgagtctcaggccactggcgagtcggacattatccgcaagaggcccgccgacgaggtctatgccgctatcgagaacaacgagaacctcaagaggatggatcccttcatccagtccggttcccgcgtcatgcagggcgctggcaaattcatggtcacctctaccggcatccactcgagctacggcaagacgatgatgtccctcaacgaggaccccgaggttacgcctctgcagtccaagctcaacgttatcgccgagtacatcgcgaagcttggtggtgccgtcgctcttcttctcttcctggtcctcttcatcatcttctgtgtccggcttactaggcagtacgcgtccatgacgcccgccgagaagggccagcaattcatcgagattttcatcgtcgtggtcacaatcgtggtcgtcgccattcccgaaggacttccccttgctgtcaccctggcgctcgctttcgcgaccacgcgcatgctcaaggacaacaaccttgtccgacacctcaaggcctgcgaggtcatgggcaacgcgaccacgatctgctccgacaagacgggcacgcttacgcagaacaagatgcaagtcgtcgccggcacgattgggacgacacatcggtttggcgccacgacagcccccggcgagccggtatccccggagaaggaagtcgggatccgggaactcgtgtccacgctgagccccgaggtgaaagacctggtcttgaagtccattgcgctcaactcgactgcgtttgagggagaggccgatggggagcggaccttcatcggctccaagacggaaactgctctgctcatcttggcccgggagcacctggccatgggccctgtcagcgaggagagagctaacgcgaagacgctgcacctgattcccttcgattccggacgcaagtgcatgggcgtggtcgttcagctggagaacggcaaggcgcgcctctacgtcaagggtgcctccgagatcatgctggagaagtgcgcccagatcctccgtgacccttctagcggcctggcctcgacgaccctcaccgaggacaaccgcgagatgatcaagaagctgatcgagacgtacgcccgcaattcgctccggaccatcggcatcatctatcgggacttcgaccgttggccgcccaggcagactcgccgtctcggcgccgagaaagacgagattgtctttgaggatatctgccggaatatgaccttcatcggcatggtcggcatcaaggatcccctgcgccccggcgtccgcgaggccgttagagattgccaaaaggcgggcgtcgtggttcgcatggtgaccggagataacaggatgaccgccgaggccatcgcggcggactgcggcatcctgcagcccaacagcgtcgtcctcgagggccccgagttcagaaacatgtccaaggcgcagcaagacgaactcatcccccggcttcatgtcctggcacgatccagccctgaggataagcggatcctggtcaagcgcctgaaggacaagggcgagacggttgcggtcacgggagacggcaccaacgatgcgcccgccctgaagatggctgatatcggcttctccatgggtatcgccggaaccgaggttgccaaagaagcgtccgccatcatcctcatggacgacaacttcaactcgattgtcaaggcgctgaaatggggccgcgccgtcaacgacgcagtcaagcgcttccttcagttccagctcaccgtcaatgtcacggccgtggtcctgacctttgtgtcggccgtgcagagcgacgaccaggtttccgtcctgacggccgttcagctgctctgggtcaacctcatcatggacacgctggccgcgctggccctcgcgacggaccccccttcggacagcgtgctgaatcgcaagcccgaacgcaaaggagcctctatcatctcgatcaccatgtggaagatgattcttggtcaggccgtgtggcagttgctgatcaccttcctgatttactttggaggagtcagcatcctccctggtcccgatgacatgaccgagggccaaatccacaccttggttttcaacacattcgtctggatgcaaatcttcaatcagtggaataaccggcgtctcgacaatgaattcaacatcttcgaaggcatgaacaagaacccttacttcatcggcatcagtgccatcatgtgcggcggtcaagtcttgattgtcatggtcggcggcactgcattccggatcgaacaccaaacggccgtcatgtggggcattgccatcgtcctgggtgttctctcgatccccgtcggagtgatcatccgcctcattcccgacgacctgatcgagaaactgataccctcatcctggaagcgccgaggtgattccaaggttcctcccgtcactgtgtcggacgacgacgagcgtttcagcgcctatcccgagcccctcgccgaggtcagggaggagttggcctggctcaagcgcgtcaagggcggccgtctcaacaacctcaagttcgccatgcagcacccccgtgagacgttcatgccctggagaagcccggtccctagccgagaacattcgcgatccaactctatccaccgcctcccgcagacgcccacacgcgcggacagcttcagttccgtggccgccccgactccggactcgcgtcggcgcagcaggagcatgcgctcgcggtccaacagtgcactcggcgcccctaccgtcatggcgggcattgtggccggcagtatcgcagccggttggtcacccatcgaccggcgcggcgagcccgactttgggcagttcccgcggccatcgctctcagtccaggagtccacgaacgagtcgcaaccggcggcgagccggtccgtcttgggcgacgtggtgctgtcagacgagccccaggagattggcgagggaccctctgagaagcccgctgccgcggccgggtctgggcatgttcctatcctgagcgttcccaaaccgcggtcgcctgcgacgcctaagccggcggagtaa

SEQ ID NO: 4191 - protein, 1437 aa, Myceliophthora thermophilia
MASSGQDTKDESAPSRRTRARPLTMPGRPTINIDTTAVSPSPAALETDAEAGTQAASTPTAAHSSPTDPSSSSHKRSLSQTRPEVQAAKASDARDSRPTSPHNVLSPFSFRGPGPNQGFLAVPNAQRSRQNSLNSTDDARSVASSQDVTVIGGGSSTGEKSTSPFGDRSDNYQIMNDKDALKPDQGKEADFVVEDNPFAFSPGMLGKMFDPKSLSAFYKLGGLAGIETGLRTNRTTGLSADETALTGTVSFEEATSRPPEKALTEAVSPPSPDHHRKPDPNEPFSSRKRVFRDNRLPVKKGKNLLQLMWITYNDKVLILLSIAAVVSLAIGLYQTFGQEHKADDPAVEWIEGLAIIVAIFIVVMVGSLNDYQKERQFARLNKKKQDRLVKAVRSGKTVEISVFDILAGDVLLLEPGDMVPVDGILIEGFDVKCDESQATGESDIIRKRPADEVYAAIENNENLKRMDPFIQSGSRVMQGAGKFMVTSTGIHSSYGKTMMSLNEDPEVTPLQSKLNVIAEYIAKLGGAVALLLFLVLFIIFCVRLTRQYASMTPAEKGQQFIEIFIVVVTIVVVAIPEGLPLAVTLALAFATTRMLKDNNLVRHLKACEVMGNATTICSDKTGTLTQNKMQVVAGTIGTTHRFGATTAPGEPVSPEKEVGIRELVSTLSPEVKDLVLKSIALNSTAFEGEADGERTFIGSKTETALLILAREHLAMGPVSEERANAKTLHLIPFDSGRKCMGVVVQLENGKARLYVKGASEIMLEKCAQILRDPSSGLASTTLTEDNREMIKKLIETYARNSLRTIGIIYRDFDRWPPRQTRRLGAEKDEIVFEDICRNMTFIGMVGIKDPLRPGVREAVRDCQKAGVVVRMVTGDNRMTAEAIAADCGILQPNSVVLEGPEFRNMSKAQQDELIPRLHVLARSSPEDKRILVKRLKDKGETVAVTGDGTNDAPALKMADIGFSMGIAGTEVAKEASAIILMDDNFNSIVKALKWGRAVNDAVKRFLQFQLTVNVTAVVLTFVSAVQSDDQVSVLTAVQLLWVNLIMDTLAALALATDPPSDSVLNRKPERKGASIISITMWKMILGQAVWQLLITFLIYFGGVSILPGPDDMTEGQIHTLVFNTFVWMQIFNQWNNRRLDNEFNIFEGMNKNPYFIGISAIMCGGQVLIVMVGGTAFRIEHQTAVMWGIAIVLGVLSIPVGVIIRLIPDDLIEKLIPSSWKRRGDSKVPPVTVSDDDERFSAYPEPLAEVREELAWLKRVKGGRLNNLKFAMQHPRETFMPWRSPVPSREHSRSNSIHRLPQTPTRADSFSSVAAPTPDSRRRSRSMRSRSNSALGAPTVMAGIVAGSIAAGWSPIDRRGEPDFGQFPRPSLSVQESTNESQPAASRSVLGDVVLSDEPQEIGEGPSEKPAAAAGSGHVPILSVPKPRSPATPKPAE

SEQ ID NO: 4192 - DNA, 3135 bp, Myceliophthora thermophilia
atgccggctactgtctccgacgcaccggccgtcgccctttccttcgcaaacaacttctggggaaaggacgatgccggtgttccaccactcctcgagcgcatgcacaatgcgaagcaaacatgcgacgagcttcgcgcattctacagcgcacgcgcatccatcgaggacgaatatgcgcggaaactcatgtcgctgtcgcgaaaagcgctgggctcgcaagagatgggcaccctgaagcagtcgctcgatgtcgtccgcggcgaggtcgagtccatggccaagcagcaccagagcgtggcggcccagatgaagagcgagctggaagaacccctcgcagcgtttacgggcgccatgaaggagcggcgcaagattgtgcagaacacggtggagaagctgctcaaggtcaaggtgcagcagactcagctggtcaacaaaacgcgcgaccgctatgaacaggaatgtctcaaaatcaagggctacctcgcccaaggccacatggtcatgggtcaggaagagcgcaagaacaaggccaagctggagaagacgcagatcagcttggcgacatccaatgcggagtacgaggccgccgtcaaggctctggaggaaacaaccgcccgctggaatagggaatggaaggcggccgccgacaagttccaggaccttgaggaggagcgcctcgactttaccaagagcagtctgtggacctttgccaacatcgcctcgaccgtttgcgtgagcgacgatgcgtcgtgcgagaagatccggctatccctcgagaagatggaggttgagaaggacatttataccttcatcaaggaaaaagggaccggtcaagagattcccgatcctcccaagtacatcaacttctgccgtggcgatgtcgactcgcaatcggacgcctccgaagacgagaactactcggtcgcgcagtttccgaggagcatcaatccggcgttccgctcatcttccccccagccgtccacattcgagtcccatcacgaccccaactcggcgctggccagagatctgaagcacagtgatgccacgacaccaaagggccgagaggtttccgtgacttcccaaagggtcccgatcattcccactcagcaacagcaacaacaaccacagcagcagcagcagaaacaggacaatcagcgggcaaagagccagccaccaaggggttaccaccctcctcaggccagtagcttggaatatgaccccaatgactttgctcccgtcccccacgacccatacccgatggacggcatgactatgctttgcaggcccaccggttcggacctgagcaccgcaccgtcgacatcttctgcgcgcccctctagcagagactcgcacagcgagacgtcgttctcgagtcaagagccaccagttcccgcctcgcctgtcaagcaagagcagccacagcaacaacagcagcagccacaacagcagcagcagcagcagcaacaacaacagcaacagcaacagccttctccctcggcctctcccgacaagaaggttctgaaaaagaagagtggctttttccaaaatcacagccccttccggcggaagagcacaaaggaggtagcgcagtcgaaccggaacacttggcatccctcgaatggccacagccgtccccagcttgctgccgctcccaaggagagcaacgatcagatcattgcgccggagcggagcatgagcccggatccgattgccgcaaatgcgagcctcgcgctaaacgttgggcagaacgtattcgccgtcgagacccctgaccgccaaaagcaggtaaccgggccggccactccagaggatgaccccattgcactggcgctggccgagctcaaaggcatcaagaccggcaagaccccaggctcgagggtgtcggcagaccactatcacggcatcgcgacgcccgggcctggtgccagcccatcgcggaccataccaggagacagcaacagtagcaacaacagcgtcgtggcggccgcgatgcgtggcaccccgccgccgtcctacgatcagcaagtccaagtccagcgtctcggggtccccccaccagcagttacctcgaaggcaatgaaggaagcctcacagaagttccagcaacagacccgcagcctcttcacccagaccgaccgtcctggttctggtggaggctacggcagccggccaggcacccgaggcggtggcagcgacgtgccgcgcgccatctcgcccgccccgcagcagcggagcgtctccccgcgcccgacctcgcgcgcaagcccacactatggctcttcccaccagcagcagtaccgctcagcgtcaccgagtccgtatgctggaagccagcaccgctcggtgtcgccggctccctacgccggcagccagcggggctcgatgtccaactcctactacggcagcggcagcagcagcggcaataaccagcaccgtggctccgtcagcgctgcctcgcccaacgacatggcgcgctcggtgagcccggccccctacagcccgcggggctcggcggcaagcccgtctccgttcagcagcagcgtcggtgctaggggctcggcggccagccccgctccgttcagcccgcgcagctcgatgcaggaccacaacgtcggccggccgggtagcagcatgagtatgggacggggaccgaccggcggcggcggcggcggtggtgactcgatggcggtgcaactcgcgcccgtgtcgcccgggggcggcgggggtggactttatcaggacgacgggggcagcgggtacggaaccgggtcgatgcggggccggcatgcccggtcgaacacggcgaccagcatgagcatgcgcggcggcgcgggtgctaatgccggcgccatgggcctgtacgagggcgccggccccgtgcaggctggctcgaggatgaggagcaggagcgtcgcggcggatccgaatcggtataccagggacgggaggccgatcttgcactttgcccgcgcgttgtacatgtatcaggcggcgatacccgaggagctcgggttcgcgaaaggcgacatcctggccatcctgcggcaccaggacgacggctggtgggaggctacggtgcagggcggatccggacaggtcgggctggtcccgagcaactacctgcagccttgctga

SEQ ID NO: 4193 - protein, 1044 aa, Myceliophthora thermophilia
MPATVSDAPAVALSFANNFWGKDDAGVPPLLERMHNAKQTCDELRAFYSARASIEDEYARKLMSLSRKALGSQEMGTLKQSLDVVRGEVESMAKQHQSVAAQMKSELEEPLAAFTGAMKERRKIVQNTVEKLLKVKVQQTQLVNKTRDRYEQECLKIKGYLAQGHMVMGQEERKNKAKLEKTQISLATSNAEYEAAVKALEETTARWNREWKAAADKFQDLEEERLDFTKSSLWTFANIASTVCVSDDASCEKIRLSLEKMEVEKDIYTFIKEKGTGQEIPDPPKYINFCRGDVDSQSDASEDENYSVAQFPRSINPAFRSSSPQPSTFESHHDPNSALARDLKHSDATTPKGREVSVTSQRVPIIPTQQQQQQPQQQQQKQDNQRAKSQPPRGYHPPQASSLEYDPNDFAPVPHDPYPMDGMTMLCRPTGSDLSTAPSTSSARPSSRDSHSETSFSSQEPPVPASPVKQEQPQQQQQQPQQQQQQQQQQQQQQQPSPSASPDKKVLKKKSGFFQNHSPFRRKSTKEVAQSNRNTWHPSNGHSRPQLAAAPKESNDQIIAPERSMSPDPIAANASLALNVGQNVFAVETPDRQKQVTGPATPEDDPIALALAELKGIKTGKTPGSRVSADHYHGIATPGPGASPSRTIPGDSNSSNNSVVAAAMRGTPPPSYDQQVQVQRLGVPPPAVTSKAMKEASQKFQQQTRSLFTQTDRPGSGGGYGSRPGTRGGGSDVPRAISPAPQQRSVSPRPTSRASPHYGSSHQQQYRSASPSPYAGSQHRSVSPAPYAGSQRGSMSNSYYGSGSSSGNNQHRGSVSAASPNDMARSVSPAPYSPRGSAASPSPFSSSVGARGSAASPAPFSPRSSMQDHNVGRPGSSMSMGRGPTGGGGGGGDSMAVQLAPVSPGGGGGGLYQDDGGSGYGTGSMRGRHARSNTATSMSMRGGAGANAGAMGLYEGAGPVQAGSRMRSRSVAADPNRYTRDGRPILHFARALYMYQAAIPEELGFAKGDILAILRHQDDGWWEATVQGGSGQVGLVPSNYLQPC

SEQ ID NO: 4194 - DNA, 774 bp, Myceliophthora thermophilia
atggaggccattcatactcatccttcgaacgccgcgcaggccaaggccttcaccgcgcctggatcgctctcgttccccggcggcgcaaacgagttcgcgaaccccgcgcctcagcccaacggaggaatgacgaccaacggcgctcagcagcagggcgtccaagccacaaacggtactggggtgactcccgcgacccccgctgcgacgcccggagctggtcctgcgggtccgagtggcatcactcccacgctccaaaacatcgtcgcgacggtaaacttggactgccgtctagacctgaagacgatcgcactgcacgcccgcaatgcggagtacaaccccaagcgtttcgctgctgtcatcatgcgcatccgcgagcccaagaccacggcgctcatttttgccagcggcaaaatggtcgtcacgggtgccaagtcggaggatgactcgaagcttgcgtcgcgcaagtatgctcgcatcatccagaaactaggcttcaatgccaagtttaccgatttcaagatccagaatatcgtcggctcctgcgacatcaagttcccgattcgccttgagggtcttgcgtcgaaacatcataacttcagctcctatgagcccgagttgttcccgggcctcatttaccgcatgatcaagcccaagatcgtgcttctgattttcgtgagtggcaagattgttctcaccggcgcgaaagtgcgcgaggagatctaccaggctttcgagatgatttaccctgtacttcaagacttccgcaaggtctag

SEQ ID NO: 4195 - protein, 257 aa, Myceliophthora thermophilia
MEAIHTHPSNAAQAKAFTAPGSLSFPGGANEFANPAPQPNGGMTTNGAQQQGVQATNGTGVTPATPAATPGAGPAGPSGITPTLQNIVATVNLDCRLDLKTIALHARNAEYNPKRFAAVIMRIREPKTTALIFASGKMVVTGAKSEDDSKLASRKYARIIQKLGFNAKFTDFKIQNIVGSCDIKFPIRLEGLASKHHNFSSYEPELFPGLIYRMIKPKIVLLIFVSGKIVLTGAKVREEIYQAFEMIYPVLQDFRKV

SEQ ID NO: 4196 - DNA, 5388 bp, Myceliophthora thermophilia
atgtcgtttgggttcggcagcggtggcttcggccagaacaaccagtcatccacctttggtggatttggcagtagcaacacaaacacgaacacaggctttggctccggaaccggtgctttcggctcaggaaccaacactggcaccaccggcaccggcatctttggcagtggcggcagtgcatttggttcaaacaccggcggtttcggttccggtggcttcgggagcaaaccagcctttggcacaccgaccaccaccagctcagggacaggattgttcgggtcgacaaccacaacagcaggtggcacgggattcggtagcggctttggctctacaaataccactagcacgccgtttggtggcggcacgtcgctcttcggtggctctaagcctgcgacatctggcttcggcacagggacgtcgactttcggcagtggcaccggcggcggccttttcgggagcagttcgaccaccggcacaggttttggcgccaccagcaatccgggcatcgggaccaacattggcgacccgcccggcaccgccattgtccccttctctcctacagtggagaaggagcccaacaacccttcgcagagcaactcctttcagaacatcttgtttatggacgcttacaagaaatggtcggctgacgagctgagactggtggattacaatcaaggcaggaaatccggcggtgttggtggtaccggcgcgtttggcggttctacctttggcggaacaactggcttcggaagcaacacaacaggcaccgggttcggcagcaacaccgggacaggcctgtttggaagcagccaaccggcctcgactggcttcggcacgactaatacgaacacgggcggattcggctccggtggcggcctcttcggtaacaagcccgcaaccggcggactgttcggaaacacgtctactagccagccttcgcagaccggtggtctttttggaagcagcggcaccagcgcatttgggaccaacactacgaacacaggcttcggatcgaatacaaccaacacggggggtggtttgttcggaaacacgaacacaaacaagcctggcgggttcagcttcggcaacaccggcaccggcactggtgcgttcggaacgacctcaacaactggctttggcgcaaacaccacttccggaactacgggtggcggcttgtttggaaatacgcagaataccacgactggcggcggtctcttcggcggtcagcagcaacaacaatctagcggcacgggattcggttccggcaccggtttcggaacgcagacgcagagcacaggtggtggtttattcggcaaccagcagcagcagaagcccggtggcctcttcggcggcggcacgtctaacaccggcaccactggtggtctgtttgggaacgcaaacacagggacgacgaccggttttggcgcttcaaccacgaaccagcctaccaccggcggtctgttcggctccaagcccgcaaccaccggcggtggtctgtttggcagtagcacgaccggtcagacgggtggcacgggcggtggtctattcggcaacctcggaggcaataaccaaaaccaacagtctcagcagggtggcttgtttggagggttgggccagaatacgcaagccaagccatccctcttcggcagctcgactactgcgggaggaagcctcttcggcaaccaatccaaccaacagcagggtggtggcttgtttggcagcagtactacccagcagcagcctcagcagggagcgctgggcagttccctcctcggtgcttctcagggccagcagatgcctcaacagccgttcaacgccagcatcaacgatatctccgcgtacggtgcccagacattgttctccggcctgccggatgacaagatccagaacccgggcccgcttgccaccccactgtcaggcaagtccaaggttaagagccgttcgatcttgccgatgtacaagctcagtcctgcgaatgcctcccgcctcgtcacccctcagaagaggggctacgggttctcgtacagcgcctacggttctcctgccagtccctccagctcttccagcacacctggtttctcgcagagcctccttgccggcagcgtcaaccgcggtctgagcaagagcgtttccgccagcaacctgcgacgtagtctgaatgtggaagacagcattcttcagcctggcgctttctcggccaactccagcgcgcgtctcggcagcgctggcagccacaaaaagctgatcatcaacaaggagatgcgaagcgatctgttcgcctcgcctagcaaggaaactagggcgctggaagacggcaacggttcgcggaaacttgccaagcgtgtcagcttcgacaccggtacggttgagacgacgaccccggacaaccgacaggcctccctggaaaacggctccagtgcggacgacctcaagtcagacagccgtgccagcaccaacggcgtgaatggctccaagccatcccctgtctcccctgctccggaggtggaacaggtccaaggcaacgagcttgccatagttcctgaagagggatcgcctgcgaccgtgcggaccgagaagaagaccggttccacgatcgagccgggcgcctactggatgtcgccgagcgcggaggagattcgcgccatgaacaggatgcagcggcagcgcgtctcagacttcacagtcggccgtgagaatgtcggcagcgtcacattcaaggtccccgtcgacctgagcaacatcaacctcgacgagatcttcgacggcatcgtcatcctggttcctcgctccgccaccgtttaccccgtcgccgcgaagaagcctcccgttggcaaggggctgaatgtgcccgcggttatctcgttggagcactcgtatcctcgtggcggtctcgcgactaccggccgccgtcttgagcgccacatcgaaaggcttaagacggcaatccccgacaccacattcgagagctacgacaaagaaaccggtgtttggacgttttctgttgaacatttcacaacctatggcctaggtgacgatgacgatgatgacgatgagaccgaggtcgagtctgaagcacgcccccccctcttgagcccatcagctgttaaggactctacctccccatccgaccccgatgacaccttcgacttcaagcgcagccggcgcgcagttcccggcgcctttgacgatgccgcactgtcggacaacgacgaggttactgataccgctcaacgtcagggtacgctgtctcctgatccccaggaggctgatgcccccttgccatcacgggagtggcccgaagatgaaagcatggctgacggacccgatgaataccagctcgaagcctatgatcagtactctcggcagggatccgttgacgaggaggaggatccattcctctcccgtcacgtggatgatgaggcgcaggtccctgctggtatcatgagggcgcgcatgcgggccttcaagaagtcgacggcgcccacgaagattgaagtggctggtggagatgattggacgcagattttgcaagcgagcgtgcgagcgccgaggactgtggaccgcgcgacgttgcgcgcgctcaacgagtcgggggcggtttgggatctgaaggatcagggcagccctgccccacaaaagaagaatgcgcctgtgcccgatggagcaggtttcgcaacaagcatcgatttgatgaagtcgctttttgagcaggccaagggtccgactcaaccggagcaggcatcgccagcgaagggcttcgtgaagtggccctaccagcaacgtcccaagatcgaccaacaggagggtccgtctattccccgcaccaactggggccccaatgggcttctggtcactactcaccatggcgagcccagcctgcagccggctgacgggactttggctgcctccgaggagtcggtcggatcgcccgagaatctcgcccggcttcaacggtacatagacagcgtttctttcaaggagggacagccaatcgccagccccgagttccgagagctagctcagggggatccttcctgggaattggcttctctcctgttcgacgacaacggatacggtctgcctgctttttggaggcagctggtgtccgaggctaccgaccgtgccctcgctcaagagcccgggctggaggagaaggcgatcatctgtctggcgggaaaccgggtagccgatgcctgtggctacctacttgccgcgggtaacttccggttggccactctcgtttccggcatcgggatgcaagacggggatatgaaggcccagctgaaggattggcgagagtcgaacgtgctggccgagttctcgcaacctgtccgagccatctacgagctcttagccggcaacgccggtgtctgcgccggcgtcaagaatgttcccattgagaaccgggttgactcgttcacgatctctcagcggttcgggctggactggatgcggtcgtttggcctccgtctcttctacacgaccggcgccaccgcgaatgtcgcggaggcggttcgttctttccaggccgacatcgagcaggacaaggagccggagccggatagcgctctgtggtcgctcctcaaggccttcgcaaaccaggagtttgactggtccgacacgcgccttggctggcttttgaccaaggcaatctacgctacagggaaggtttcatttggacaggatgccgccgagaagctcgacaaggcctccctggcttatgcttcggccctcacggcgcagtcccagtgggtacctgccacctttgttctcctccagctttcggacgccgcatcccgtgaggctgccgtgcgcgaccacctcggccgtcacgcgcgccgcattggctcgccgcgcaacccaaacagcgccttctcctcgctccggaagtttggcgtgcccgagacttggatctgggaggccaaggcgctcgacttccgcgcccggggagactcgcagcaggagttcctcgcgctggtctgggcgcagaactatagcgaggcgaaccaggcctttgtccatcgcgtcgggccagacctggtcatcgcgcgggacttccggcgcctcttccgcttcgcacagctcctgttcaaggtgaaaggcaaactgcaagactgggaccgcggggccgcggtctatctgctgtatccgatggcgcggttgcagggtaagcagcacgggctggataaatttgatcaccagctgtttgacggactggtggcgctgcgcgggcagacccatggggatatcaggcaggaagcggcgatcgcggacatggcggaggacttgatccggtgcagaggcggggaccctaggctgtttggcctgctgccggaggatgtgaggagcaagtatatgcgcgcgcaggcgctcgaggttatttgctga

SEQ ID NO: 4197 - protein, 1795 aa, Myceliophthora thermophilia
MSFGFGSGGFGQNNQSSTFGGFGSSNTNTNTGFGSGTGAFGSGTNTGTTGTGIFGSGGSAFGSNTGGFGSGGFGSKPAFGTPTTTSSGTGLFGSTTTTAGGTGFGSGFGSTNTTSTPFGGGTSLFGGSKPATSGFGTGTSTFGSGTGGGLFGSSSTTGTGFGATSNPGIGTNIGDPPGTAIVPFSPTVEKEPNNPSQSNSFQNILFMDAYKKWSADELRLVDYNQGRKSGGVGGTGAFGGSTFGGTTGFGSNTTGTGFGSNTGTGLFGSSQPASTGFGTTNTNTGGFGSGGGLFGNKPATGGLFGNTSTSQPSQTGGLFGSSGTSAFGTNTTNTGFGSNTTNTGGGLFGNTNTNKPGGFSFGNTGTGTGAFGTTSTTGFGANTTSGTTGGGLFGNTQNTTTGGGLFGGQQQQQSSGTGFGSGTGFGTQTQSTGGGLFGNQQQQKPGGLFGGGTSNTGTTGGLFGNANTGTTTGFGASTTNQPTTGGLFGSKPATTGGGLFGSSTTGQTGGTGGGLFGNLGGNNQNQQSQQGGLFGGLGQNTQAKPSLFGSSTTAGGSLFGNQSNQQQGGGLFGSSTTQQQPQQGALGSSLLGASQGQQMPQQPFNASINDISAYGAQTLFSGLPDDKIQNPGPLATPLSGKSKVKSRSILPMYKLSPANASRLVTPQKRGYGFSYSAYGSPASPSSSSSTPGFSQSLLAGSVNRGLSKSVSASNLRRSLNVEDSILQPGAFSANSSARLGSAGSHKKLIINKEMRSDLFASPSKETRALEDGNGSRKLAKRVSFDTGTVETTTPDNRQASLENGSSADDLKSDSRASTNGVNGSKPSPVSPAPEVEQVQGNELAIVPEEGSPATVRTEKKTGSTIEPGAYWMSPSAEEIRAMNRMQRQRVSDFTVGRENVGSVTFKVPVDLSNINLDEIFDGIVILVPRSATVYPVAAKKPPVGKGLNVPAVISLEHSYPRGGLATTGRRLERHIERLKTAIPDTTFESYDKETGVWTFSVEHFTTYGLGDDDDDDDETEVESEARPPLLSPSAVKDSTSPSDPDDTFDFKRSRRAVPGAFDDAALSDNDEVTDTAQRQGTLSPDPQEADAPLPSREWPEDESMADGPDEYQLEAYDQYSRQGSVDEEEDPFLSRHVDDEAQVPAGIMRARMRAFKKSTAPTKIEVAGGDDWTQILQASVRAPRTVDRATLRALNESGAVWDLKDQGSPAPQKKNAPVPDGAGFATSIDLMKSLFEQAKGPTQPEQASPAKGFVKWPYQQRPKIDQQEGPSIPRTNWGPNGLLVTTHHGEPSLQPADGTLAASEESVGSPENLARLQRYIDSVSFKEGQPIASPEFRELAQGDPSWELASLLFDDNGYGLPAFWRQLVSEATDRALAQEPGLEEKAIICLAGNRVADACGYLLAAGNFRLATLVSGIGMQDGDMKAQLKDWRESNVLAEFSQPVRAIYELLAGNAGVCAGVKNVPIENRVDSFTISQRFGLDWMRSFGLRLFYTTGATANVAEAVRSFQADIEQDKEPEPDSALWSLLKAFANQEFDWSDTRLGWLLTKAIYATGKVSFGQDAAEKLDKASLAYASALTAQSQWVPATFVLLQLSDAASREAAVRDHLGRHARRIGSPRNPNSAFSSLRKFGVPETWIWEAKALDFRARGDSQQEFLALVWAQNYSEANQAFVHRVGPDLVIARDFRRLFRFAQLLFKVKGKLQDWDRGAAVYLLYPMARLQGKQHGLDKFDHQLFDGLVALRGQTHGDIRQEAAIADMAEDLIRCRGGDPRLFGLLPEDVRSKYMRAQALEVIC

SEQ ID NO: 4198 - DNA, 789 bp, Myceliophthora thermophilia
atgcctccgaagtctggtaagaaggtcgccccggcccccttccctcaggggaaggctggctccaagaaggcccccaagaacccgctcatcgagaagcggcctcgcaacttcggcattggccaggacatccagcccaagcgtaacctgtcgcgcatggttaagtggccggagtatgtccgcctccagcgccagaagaagattctcaacatgcgcctgaaggtgcctcctgcgattgcccagttccagaacgtcctcgacaagaacacggccgctcaggtcttcaagctcctcaacaagtaccgccctgagaccaaggccgagaagaaggagcgtcttctgagggaggctaccgccatcaaggagggcaagaagaaggaggatgtcagcaagaagccctacgtcgtcaagtacggtctcaaccacgtcgttggcctgattgagaacaagaaggcttctctcgtcctcattcccaacgatgtcgatcccatcgagctcgtcatcttcctgcccgctctctgccgcaagatgggcatcccttacgccatcatcaagggcaaggctaggctcggcactgtcgtccacaagaagaccgccgctgttcttgcgatcaccgaggtgcgctccgaggacaagaacgagctcgccaagctcatctctgccatcaaggagggctaccttgagaagaacgaggattctcgcaagcgctggggcggtggcatcatgggcgccaaggcccagaagcgcattgagaagcgtcagaaggccattgagacggccatcaaggtctaa

SEQ ID NO: 4199 - protein, 262 aa, Myceliophthora thermophilia
MPPKSGKKVAPAPFPQGKAGSKKAPKNPLIEKRPRNFGIGQDIQPKRNLSRMVKWPEYVRLQRQKKILNMRLKVPPAIAQFQNVLDKNTAAQVFKLLNKYRPETKAEKKERLLREATAIKEGKKKEDVSKKPYVVKYGLNHVVGLIENKKASLVLIPNDVDPIELVIFLPALCRKMGIPYAIIKGKARLGTVVHKKTAAVLAITEVRSEDKNELAKLISAIKEGYLEKNEDSRKRWGGGIMGAKAQKRIEKRQKAIETAIKV

SEQ ID NO: 4200 - DNA, 1518 bp, Myceliophthora thermophilia
atggctgcgcaatccgagttcggggatatggggttgtccatcctggggctgggcacgcaataccctccctacgacctgaagccgagctcgctcgaggtgctgagcaagcgattttacccagaatcgccagccatgagcaaggtgctctcgatcaaccggtacacgggcatcgaccaacgctcctcgataggaacgccggaccacccgctggtgaaccagccgaacccgccgaccatcagcgagctcaacgagaccttcatgagggacggcgtgccgttagcggtcagtgccgcgcggaaagccctggccgaggcgcgccttgagccggcgcaggtcacgcacatggtctcgaccacatgcaccaactcggcgaatcctggctacgatcatttcgtcgcgagggaactccgcctgagccccggcaccgagaaggtcctcctccacggcgtaggctgcagcggcgggctcgcggccctccgcacggcagccaacctctgcctcggccacacgatgcggcggaagcctgcgcgcattctcgtcgtcgccctcgagatcagcaccaccctggtccggagcgagctcgagtccatcaacgcctcgcaggaaacccgcatcggcgtcgccctcttcagcgactgcgccagcgcctgcctcctctccaactccctacccttcccggacgacggcccctccggccgcccttcgccgcccccgccgccagcaatctactccctcctcggctggcagcaccacaccatcccagacaccgaacacgacctcggcttcgacgtcgacccgcacggctggaaggtcgttctgtccccgcgcgtgccccagctgacccagtccgtcctgcttcccaccttcacctccctactggcctccctaccccctccgttctcctccccgggcgaccaacaacacccccaccaacaacacccccaccagcagcagcagcagcagcagcagacgccagagctgaaacccgccgacttcgactgggccatgcaccccggcggcgccaccatcctctcgggcgccgagcaggccctggggatcacgcccgcgcacatgcgcgccagctacgacacgtacatcaaccacggcaacagctcgtcggccaccatcctcagcgtcctggaccgcctgcgccacaaggacatggacgcgctggcccctcccgccgggagcggtccggacggccgcggcggcggcggcgtgaaggagcacgtggtcggctgcgcgttcgggcccggcatcaccgtcgagatgtgcatgttgaggaggaacctgcgggacgggtttggcatgtctgcgtctgcgaggggcatgggaacgccgcccgagacggagagcgaagggggcggtgccacggatgtcgacgaggcgagcgaggccggggaggaggggaacccaacgagtggtcggaccgggaccgcagcgcaacaacggagcggcgctcaagacgatggtgaggcgttcatcagcgaggaattggagcgtgtggagttggactga

SEQ ID NO: 4201 - protein, 505 aa, Myceliophthora thermophilia
MAAQSEFGDMGLSILGLGTQYPPYDLKPSSLEVLSKRFYPESPAMSKVLSINRYTGIDQRSSIGTPDHPLVNQPNPPTISELNETFMRDGVPLAVSAARKALAEARLEPAQVTHMVSTTCTNSANPGYDHFVARELRLSPGTEKVLLHGVGCSGGLAALRTAANLCLGHTMRRKPARILVVALEISTTLVRSELESINASQETRIGVALFSDCASACLLSNSLPFPDDGPSGRPSPPPPPAIYSLLGWQHHTIPDTEHDLGFDVDPHGWKVVLSPRVPQLTQSVLLPTFTSLLASLPPPFSSPGDQQHPHQQHPHQQQQQQQQTPELKPADFDWAMHPGGATILSGAEQALGITPAHMRASYDTYINHGNSSSATILSVLDRLRHKDMDALAPPAGSGPDGRGGGGVKEHVVGCAFGPGITVEMCMLRRNLRDGFGMSASARGMGTPPETESEGGGATDVDEASEAGEEGNPTSGRTGTAAQQRSGAQDDGEAFISEELERVELD

SEQ ID NO: 4202 - DNA, 321 bp, Myceliophthora thermophilia
atgagccggttgcatggcgtcgcagttggaaagaggccggtcgcatcccgctctctcaggttgcgaccgaacgacgaccaggaccaggaccagggagcggccctcgaaaaaaggaatggctgggaagctgtccaaggccgccccacctcacgccggcactcgccccgtggccaaccatccaacgcccacctcactccacccccgctgtcccttgccaagagcggggcggcaagagcatggcgagtcccactccacctgccgagtcctctgtttcgattcgtcaacgattatcgagacgatgcggcgtttgcactcgtgtga

SEQ ID NO: 4203 - protein, 106 aa, Myceliophthora thermophilia
MSRLHGVAVGKRPVASRSLRLRPNDDQDQDQGAALEKRNGWEAVQGRPTSRRHSPRGQPSNAHLTPPPLSLAKSGAARAWRVPLHLPSPLFRFVNDYRDDAAFALV

SEQ ID NO: 4204 - DNA, 387 bp, Myceliophthora thermophilia
atgctcgcttcgagagttgagaattcggcccaagggttgcgccacttgggtcttctggttggcagcgctttgataaagcaacacgatgctggtaatccaaccaaacttgtcagggttggtgcagattcaccgagtacaggaccacaggctcgggtatcttgtgccgcttacgcctgcttcgtgcctggctcaagctcgaagctccttctagatgccactgccactgatgacggaagtcgtcagcagcaggccgtcactgcgggacccaccgataacactagcgataagctgggtacttctccgtaccccgccactgcccgccacaatcctcccacatgtccaagtgtcaaggtggccaacaacgcaacaagtctcctcgatagatga

SEQ ID NO: 4205 - protein, 128 aa, Myceliophthora thermophilia
MLASRVENSAQGLRHLGLLVGSALIKQHDAGNPTKLVRVGADSPSTGPQARVSCAAYACFVPGSSSKLLLDATATDDGSRQQQAVTAGPTDNTSDKLGTSPYPATARHNPPTCPSVKVANNATSLLDR

SEQ ID NO: 4206 - DNA, 534 bp, Myceliophthora thermophilia
atgcgacgtgtgcctcatgatatgccaggtgtcacccgctgctcacatggcgcttcatcaaccagtacggtcctgctaatgggcgaccccaacaaagaccctgatgatgaccttactgaggtaccttatccacaggtacttcgtcctttagggcctcgtgcgcttgagcccccgagaataaccactgacgaaagaccggcgctttcctcttctctgcggcaaaagaccgtggatttcggtgaaagcaacacgactttacgccaggaaagcaaccgcgtcccgtcagggttacatgctacaaaacgagaaaaacctccccggcttgtctttttgcgcacagccatgatgatccttgttgcccgtgatgaaaaagcgctcgagtctgccgcctccgttaacaagcaagtgcagcagagagattggaagctcggggcaggatggtgggagttccttaaaccaagctttgcgggtccttgtctcaggtggcacggagggcgggaggcggagaaacagagcggaggctacgccccatag

SEQ ID NO: 4207 - protein, 177 aa, Myceliophthora thermophilia
MRRVPHDMPGVTRCSHGASSTSTVLLMGDPNKDPDDDLTEVPYPQVLRPLGPRALEPPRITTDERPALSSSLRQKTVDFGESNTTLRQESNRVPSGLHATKREKPPRLVFLRTAMMILVARDEKALESAASVNKQVQQRDWKLGAGWWEFLKPSFAGPCLRWHGGREAEKQSGGYAP

SEQ ID NO: 4208 - DNA, 1173 bp, Myceliophthora thermophilia
atgcactacataagattctgccggccccccgaggtccaggccggcaggtcgcatgctaccgtcaagattgtgctgacaatcaccaccgacttgagcgactcgttcctctcgcctcgcactcccatccaattggccgtcatcggcgcctacacggagcgccgagatggaaaggaccaacttgtaccggtcaacttgactcaaggcagtccgccgacatggcgagccggcatgagagtcctcaagctggacctgcctttgccaccgcagccgatcgagaccatccagatccggccgctgagtcgccagctgacagcgatgggcacggacgacgtcctccccggcaaccggggcttgatcatggcggtctatgcggacatgccccggccaggggatgggcgtgcgccctccgtatgtttccggagcctgcggttgtctaccggcgatgttgccgctggccagacactgcagatcgaggaagaactcggcgagagcatcgcacgccacatctgggattccggcatcgtcgtggtgtctcttcttgcggacctctgcttatgtaacacggacgaagctggcaccaagccgttaccgatgcttcgcaacatcctgcagggtccggaccggccattgaacattctcgagcttggctgcggtgttggggtcatgggcatcggtctagcacgaatcatgtcgctgagacgggcaggacagcgaccccacattcttatgacagaccttccggaggcggagcagaaagcacgggcgaacatagcccgccaggcagatcatttgggtgacgcttcggccagtctcgattttgagcccctcgactgggaagatggggcaaatggcacatttggcgagaaagcctcgtctcgcccagtcgatcttgccgttctttgtgactgcacctacaacaccgacactctgccgcccctagtcaagacgttgtcagctctccatcgtcactccgaattgttctcggccccagaaggacccgtcgagaccaaggttttagtcgcaacaaaacccaggcacacatccgagagggccttcttcgatttgatgtctgatgacggatgggtcattcgggaacagactgttctacccctgcctttactcgacgctgaggggcaaacggtggagatgtatttgttcggaaaagaaaaatga

SEQ ID NO: 4209 - protein, 390 aa, Myceliophthora thermophilia
MHYIRFCRPPEVQAGRSHATVKIVLTITTDLSDSFLSPRTPIQLAVIGAYTERRDGKDQLVPVNLTQGSPPTWRAGMRVLKLDLPLPPQPIETIQIRPLSRQLTAMGTDDVLPGNRGLIMAVYADMPRPGDGRAPSVCFRSLRLSTGDVAAGQTLQIEEELGESIARHIWDSGIVVVSLLADLCLCNTDEAGTKPLPMLRNILQGPDRPLNILELGCGVGVMGIGLARIMSLRRAGQRPHILMTDLPEAEQKARANIARQADHLGDASASLDFEPLDWEDGANGTFGEKASSRPVDLAVLCDCTYNTDTLPPLVKTLSALHRHSELFSAPEGPVETKVLVATKPRHTSERAFFDLMSDDGWVIREQTVLPLPLLDAEGQTVEMYLFGKEK

SEQ ID NO: 4210 - DNA, 330 bp, Myceliophthora thermophilia
atggcgtccaagccgtctacctgctgcggcaagagcgccgagtgcgtttgcgcccagcaagccacctgctcctgtggcgagcagcctgctctccactgcaactgcgagaaggccagcaccgagaactctgtcgagggtgcccgctgctcgtgccgcgcccgtcccaccggccagtgcaactgcgcgcgcgccgaaaccgagaaccagaagcccagtagcaacgcctgcgattgtgggctccgtgcctctgactcttgcacgtgctcgaaggctgcggatggtggttataacccgtctgagcacgagacggatttcaccaccaagaaataa

SEQ ID NO: 4211 - protein, 109 aa, Myceliophthora thermophilia
MASKPSTCCGKSAECVCAQQATCSCGEQPALHCNCEKASTENSVEGARCSCRARPTGQCNCARAETENQKPSSNACDCGLRASDSCTCSKAADGGYNPSEHETDFTTKK

SEQ ID NO: 4212 - DNA, 282 bp, Myceliophthora thermophilia
atgatgttcgatcacgacaccgatgatttcaatgcaggaaccggcttcgatacttcgtccaggcccaattgttctgatggtggcttcgccgattctacgccccagaggacgacacatacggcgatctttcccggctgcgttccgaaatctttctgcatcgatgtgactcctgagcgcgaagaggaggccgagtggaagccatggcgtatcgccggtcgcgtcaaacgtcgaggcaagagggcacaaagaatcagccaaatatcgggttgcatgcacatttga

SEQ ID NO: 4213 - protein, 93 aa, Myceliophthora thermophilia
MMFDHDTDDFNAGTGFDTSSRPNCSDGGFADSTPQRTTHTAIFPGCVPKSFCIDVTPEREEEAEWKPWRIAGRVKRRGKRAQRISQISGCMHI

SEQ ID NO: 4214 - DNA, 1860 bp, Myceliophthora thermophilia
atgcctcccaagagagcgccggcggcggcggcgggcgagtctgccccggccgcgaagaagaccaaagcggctgctggtgcggcgaagatagccgtcgtctcggagaggcccaagaaggctgcgccggccgccagtaaggccgctgtgaccaagaaatcgacaaccgctgcgagcagcgcggcgcccccaaagaaagctactgctaaagctcccgcccctaagaaaacgactgctaaggccactgcttcgaaaaaggccgcgcccaaagcggccgctgctccgaagaaggctgtcgcgtcgtcgcgcaagaagactgccaaggccgtcgaagaatcagacaaggagaatgaggtcgcggagcctcaagtcaatggcgtcaagcgtaagcgggaagaggaagaagataaggaagccggcgagcacgccgctggcgatgctggagttagcgaccagcggggcaccaagcgcgcgaagaagggtgaggacgaggccgcgccggccaagaagaaggtcgcggcccccaaggcggcaccgaagcgcgctgtgcgcgaacttaaggaaatcaacaagccgccgactcaggtcatggatatcttcgtgtttggtgaaggtaccgccggcgagcttggccttggcagtgtccgcgtcgacgggaagaagcctatcgacgtgaagcgcccgcgtctgaatcccaacctcaagggcgtcgtgcaggtcgcctgcggcggcatgcacgttgccgctctgaccatagacaacaagatcctgacatggggcgtcaacgatcaaggcgctctcggtcgcgacacgacctgggagggcggtctgagagacgtcgatgatgaggacgaagattcggaggatggcgacgataccgggatgaacccgaaggaaagcacacccggagagattgacacgtctaacatcccccatgacgtcaagtgggtgcaggttgtcgccagcgacagcgccacctttgccttgaccacgaccggccaggtctatgggtggggcacgtttagaagcaacgaaggcgttctcggcttcagccggaatgtcctcatccagcgcactcccacccttgtccccgagctttccaggatcaagcagctcgccgctggcctgaaccacgtccttgccctcgacgacaagaacaaggtctacgcctggggcgccggccagcaagcccagctcgcccgacggctcctcgaacgcgacgactcggccgccctctaccccaccggcatcggctcgctccccggccgcgccaaggtcgcaaagctcgcctgcggctcgtaccactcgttcgtcatcgacaccaagggtcgcgtcatcggctggggcctcaacaactatgccgagctcggcgtcgaggacgaggccggccaggacggaggctttgtgatgcggccgcagctcatcaaggcgctcgagccgtacgagatcacatgcatcgccggcggcgagcaccactcgctggcgtgcagcaagaacggcgagctgctcacgtggggccgcatcgacgggcatcaggtcggccagccgtccgggtccttctccgaggacaacacgatctgggacgagcgcaacaagccgcgcatcctagtcgtgcccaccgtcgtgccggacatcaaggacgtcgtccacgtggccgcgggcaccgaccactccttcgctatcaccgcggacgggaaggtgtactcgtggggtttctcggccaactatcaaacgggccagggcacgaccgacgacatcgagtccccgaccctcatcgaaaacagcgccatccgcgataggaagattgttttcgctggtgctggtggccagtacggcatcgtcggagcgctgccggagaactga

SEQ ID NO: 4215 - protein, 619 aa, Myceliophthora thermophilia
MPPKRAPAAAAGESAPAAKKTKAAAGAAKIAVVSERPKKAAPAASKAAVTKKSTTAASSAAPPKKATAKAPAPKKTTAKATASKKAAPKAAAAPKKAVASSRKKTAKAVEESDKENEVAEPQVNGVKRKREEEEDKEAGEHAAGDAGVSDQRGTKRAKKGEDEAAPAKKKVAAPKAAPKRAVRELKEINKPPTQVMDIFVFGEGTAGELGLGSVRVDGKKPIDVKRPRLNPNLKGVVQVACGGMHVAALTIDNKILTWGVNDQGALGRDTTWEGGLRDVDDEDEDSEDGDDTGMNPKESTPGEIDTSNIPHDVKWVQVVASDSATFALTTTGQVYGWGTFRSNEGVLGFSRNVLIQRTPTLVPELSRIKQLAAGLNHVLALDDKNKVYAWGAGQQAQLARRLLERDDSAALYPTGIGSLPGRAKVAKLACGSYHSFVIDTKGRVIGWGLNNYAELGVEDEAGQDGGFVMRPQLIKALEPYEITCIAGGEHHSLACSKNGELLTWGRIDGHQVGQPSGSFSEDNTIWDERNKPRILVVPTVVPDIKDVVHVAAGTDHSFAITADGKVYSWGFSANYQTGQGTTDDIESPTLIENSAIRDRKIVFAGAGGQYGIVGALPEN

SEQ ID NO: 4216 - DNA, 951 bp, Myceliophthora thermophilia
atgtcacaatactacggcgcaccgccgaaccagggctacgctccgaccggtgcccagaaccttcagttctattcatcaaactacgcacaaccagtctcgggccatgcgactccatcacaagcatcctacggctatggcgggccctctgcgggcgcctacggtgcttccgcctctttcgcttcggggttcggcgatgcctcggacgtgtccggtcgcatgggcgagcagggcggtcttcgaaccggctggctagccgctttctcaacagagggctaccctggcgagccaccgttgctagaagagctcggtgtgaacgtgggacacattggtgccaagaccctcgccgtcctcaacccttttagccgcatcgaccagcacctcatggacgacagcgacctcgccggcccgctcttcttcttcctcctctacggcaccttcctcctgctctccgggcgcgtccactttggttacatctacggcctcgccgtcttcggctccgtcctcctccacggaatcctctccctcatggccccctccgcccagagccaacaggcgcacgaccccgccgccgccgcagcttacccgggcgccgaaccggtaaccgccatgggcggcgccgcccagcccgccgcgacggggagcaacctgacctttgcccgctccgcctccgtcctgggctactgcctcctgcctctggtcgccaccagcctggtgggcatcttcctgcccatggacaagcccgcgggcatcacgctctccagcgccgccatcatgtggtgtacctggagcgcgagcggcatcttctgcgccgtcggcggcatgcgcggcatgcgcgcccttgtggcctatccgctggcgctcttctacgtcgggttcggtatcatcgccgtgtttagcagccggggaagcgggtcgtttgccaaggtcgctggtggttcgggggcggtttga

SEQ ID NO: 4217 - protein, 316 aa, Myceliophthora thermophilia
MSQYYGAPPNQGYAPTGAQNLQFYSSNYAQPVSGHATPSQASYGYGGPSAGAYGASASFASGFGDASDVSGRMGEQGGLRTGWLAAFSTEGYPGEPPLLEELGVNVGHIGAKTLAVLNPFSRIDQHLMDDSDLAGPLFFFLLYGTFLLLSGRVHFGYIYGLAVFGSVLLHGILSLMAPSAQSQQAHDPAAAAAYPGAEPVTAMGGAAQPAATGSNLTFARSASVLGYCLLPLVATSLVGIFLPMDKPAGITLSSAAIMWCTWSASGIFCAVGGMRGMRALVAYPLALFYVGFGIIAVFSSRGSGSFAKVAGGSGAV

SEQ ID NO: 4218 - DNA, 990 bp, Myceliophthora thermophilia
atgaggtcgcgcgcctggctgcaagcgctccgcccaatgcggatagcctccccaggcgtactaccaatacagtaccttcgaacccctaccaggcggtcgcccatcctcaagcagataatagcccgttccgcctcgtcgtcgtcctacacagcgaaagcgaggaccgcatcatcatcaacacccgcctcccgcgcccgcgctgcctccgcctccaaaccttccacgcctagcactccggccacccccgcccccgcccccgccaatcccgtgctcgatcctcaagccgcgatcctcccggctgccaccgtcgccgacgtcgacccgcagctggccgcggacatccccacccccgaagccagcagcagcagcacctccgccgcgtccccggccttcgccgccgcgctcagcggcaacgccagcggcagcagcagcggcaacaatggcgcggcgatcgactggtcctcctccttccacggcctctcgacgacacccttcagccccgagacggcggccgtgctgatgcagccgctggacccgctcgacatcgagatcaagcccgacggcatcatctatctccccgagatcaagtaccgccggatcctgaacaaggcttttggccccggcgggtggggcctcgccccgcgcggggagctggtggtgggcgagaaggtggtgacgcgcgagtacgcactcgtggtccacggacgattcatcgcccaagctcgcggcgagtgccagtacttttccgaggagacgatcccgacggccggcgaggggtgcaagtcgaacgcgctgctgcggtgctgtaaggacctgggcatcgcctcggagctgtgggacccgcgcttcatccgcgagttcaagaagacgcactgccacgagatctgggtcgaacacgtcgtcagcaagaagcgccgccagatctggacgcgcaaggacggcgagccggcgtacccttaccaagcggtcaaggctgggagcaggatgtga

SEQ ID NO: 4219 - protein, 329 aa, Myceliophthora thermophilia
MRSRAWLQALRPMRIASPGVLPIQYLRTPTRRSPILKQIIARSASSSSYTAKARTASSSTPASRARAASASKPSTPSTPATPAPAPANPVLDPQAAILPAATVADVDPQLAADIPTPEASSSSTSAASPAFAAALSGNASGSSSGNNGAAIDWSSSFHGLSTTPFSPETAAVLMQPLDPLDIEIKPDGIIYLPEIKYRRILNKAFGPGGWGLAPRGELVVGEKVVTREYALVVHGRFIAQARGECQYFSEETIPTAGEGCKSNALLRCCKDLGIASELWDPRFIREFKKTHCHEIWVEHVVSKKRRQIWTRKDGEPAYPYQAVKAGSRM

SEQ ID NO: 4220 - DNA, 1311 bp, Myceliophthora thermophilia
atggccagttcctgggtgcccgacatggacccggccagcgacttctcgctggccaacatcccgttcggcatcatctcgaccacggccgacccggcgccgcacgctgccgtggcctttggctcgttcgtcctggacctcaaagtgctctcggcaaacgtggacctgagccagatcttccccggcatcgacggccttgccgaagccttctcgcaacccaccctcaacgccttcgcccagatgggccgggccgtccaccgccgggtccgctccgcactccaggacctgctctcgaagaagaccgcccacccggccgtcctccgcgacaacgccgccctgcgcagccaggcgctgctgccccagtcagccgtcaggatgcacctccccatggccatcggcgactacacggacttttacgccggttaccaccacgcctacgcggtcggggtcatgttccgcgggccggaaaacgcgctgcagcccaactacctgcacctgcccgtcggctaccacggccgagcgtcgagcgtcgtggtgtcgggcacgcccatccgccggccggtcgggcagatcctgccggacccggcggccgagccgaagcggcccgtcacggcgccctcgcgcaagctggacatcgagctcgagctgggctgcttcatcgcgcgcggaaaccacatgggcgacgcgattcccgtgggcgatgccgaggagcacatcttcggatacgtcctgctcaacgactggagcgcgagggacgtgcagacgtgggagtacgtcccgctgggcccgttcaacggcaagaattttgccaccaccatcagcccgtgggtggtgctcgccgacgcgctggagccgttccggacccgagggatcgagaatgcgacggagttgcagggctatctcaaggagccgagggaggagcgcgtgtttgacaacagaaccaatgctgacagctggttgctgccgccagctgccgagggcaccactactacgattggtcgcaccagttccaggcacctaatctggtccttcccgcagatgatcgcccaccacaccctcgggggctgcccgctgcggcccggcgacctgctggggtcgggcaccatcagcgggcccggaggcgtcgacgagcgcggcagcttgctggagatgaccgagaacgggaagaaggaggtgcagctggcggggatggacgctcgaacgtttctcaaggatggcgataccatcacgctgcgcggcttttgtggggaagagggtgcccgagtcggatttggcgagtgcagagggaagatctacagcgccgtacagagatga

SEQ ID NO: 4221 - protein, 436 aa, Myceliophthora thermophilia
MASSWVPDMDPASDFSLANIPFGIISTTADPAPHAAVAFGSFVLDLKVLSANVDLSQIFPGIDGLAEAFSQPTLNAFAQMGRAVHRRVRSALQDLLSKKTAHPAVLRDNAALRSQALLPQSAVRMHLPMAIGDYTDFYAGYHHAYAVGVMFRGPENALQPNYLHLPVGYHGRASSVVVSGTPIRRPVGQILPDPAAEPKRPVTAPSRKLDIELELGCFIARGNHMGDAIPVGDAEEHIFGYVLLNDWSARDVQTWEYVPLGPFNGKNFATTISPWVVLADALEPFRTRGIENATELQGYLKEPREERVFDNRTNADSWLLPPAAEGTTTTIGRTSSRHLIWSFPQMIAHHTLGGCPLRPGDLLGSGTISGPGGVDERGSLLEMTENGKKEVQLAGMDARTFLKDGDTITLRGFCGEEGARVGFGECRGKIYSAVQR

SEQ ID NO: 4222 - DNA, 2871 bp, Myceliophthora thermophilia
atgaccgatgatattacggattgctcgcaggaggattcgccaagatcatcttctattgaatccttccagtatgcaggaaattcgaactgggaacgaccagggaagcccgttgcgctcactcatcagggcaagggcggctcacggggcggtcgggggttggaaaacgcccctcgtctcgcgcgaagctcctccgctgcgaccaggttgctcatcggatcggaccattcgcgcagtgctcagcactggtttacacgacgccacgctggcagcaaggtcgcacgtgtacatagtcgcgagtcgatggatctgctcgagaaccaggtcagcgatttgcgctcgtttctgggggcgggtgcggcagaggtagcggctccgcaaggcccagacacagcacccgcgccagcgcacgacgtcgccggctgcgctccgtcgccctcgggagctccactccgcagcaccagcagccaccgctcgtcgctttccgccctcggagacaattccgcaccgcaccaccaccaccaacccctgtccccgcccggaagcggaagcaacatcaacggcagtgcgaagaagagggtcaacgaggccgaggatggcccagccaagcagcagagaagcaaaagaaataggtacatctcaattgcatgcaatgagtgcaaacggcgcaagatcaagtgcaacggccagacgccctgccagcggtgcggtcacctgaacctgcaatgtctctacgctcccaactgctgctccaacttcaaggactcggacgagttccggcagatggccgatcaggtcaggcagctgcagcagcaggttgacaccctcttcacttccctcgaatcgctgagacaggaaaccgcccgtctcgccccgctgcaggaccgcgtcctccctctcccttcggccgccgcgcccgccgcttcacccttgacctcgtcgagcacccagtcccggccggccctcgccttccgggtcccctcgttcttcaacgggccaaccagtagcgccttctccgtcggcgttgccaagaacaccctcaaaacgatgggatattcaggagccggagacgccagcgaggacagcggcacgctcccggacgcgacaccacagacctcccccatgctggcgcccgtatcctccggggccccactcccacagggccaggcgcccgccgatccgatctgggagctcgacgagcccgagatgatgcgcctcttgcaggtctaccgcgaggaagtcgacgccatgtatcccgtaacctcggttcattccgtcgaggagcacatcaagtacatcgccgcctggatggacacggctaggcgaaccggcaccatgcagtccccggggtccgccgaggtcatccaggacaccaagaccctgctgctcaagatcgtattgtgctgcgctctcatggttgacgagcacggcaatagtgatagggccgctcgcctctacgaaagcatccagccgaccgtcgacaagatgctcatgacccagcctgccgacgtgaccaagctacccttcctcgccctgtgcgccggctatcgctacctctccaacgacgaggtgctcgcctggcggatgatggggcacgtcgcccgcctctgtttcgagctcggcctgcaccggcgcgaaggcctgcagaacatcaccgacccggctctccgcagggacgccctgcataccttctgggctgcatatatcctggaccgccgctggagctttagcaccggcctgccgtttgtgtgccacgacgacaagatcgatcccaggctgccataccctgagggatatcctttcctagtagccatgataggacatgcgaggctcggtgccaagatatggaggcttgtcgactattttgaacctgccatcgtccgggaactaaagccccgcgactttgaggagctggatcgtgagattatggactggtacgagagcgttccggaggaggtcaagaccggcccgctggacgtggacaagatgtcagtcccttcaggcccgtatgacatccaacggttgcggatatggacccgccttcggttgaaccaggtacgaatttggctgtacacgccggttttgcacagcgccatcagtatcttgaacaacgcgccgctcgcccaaagagtggtcgacttagccaaggagaccatccgcctcctcgcacgcctcaacaacgaaaccgacttctaccgtcgcatccaagttttttaccatcagtttctcacctcttccatagcggtgctgttcctggcttccacccacgccccgctgcagttcagcgcaaactgtcgagaggagttctacatggcactcgacctcgtcaaggagctgtcggccaaatcctgggtgtcgcagcgcctatggcgcacaatccgctcgctgcgcgcgtacgcgcctcgactcggactcgaggacaacccggggcgcacggcagccagcgggacgtcgccctatgcgcacgcaggtagcgggagcaccggccacagccccggcttgtcggcatccttcaacggcggtggtagtgccgtgagcccttcgcccgccaagggccccgcggccacggcccccaccaacgccagcgcggtgcccacgccggggtcgacgcggccgatgcagcttgacgattccctcagtaacggtctgcggctgcagagtgaaatgtcgcggatctatgaaggttacacctgcgtgacgagtgcggtcggggccgaaagtaccaccggcagcaacagcatacccgggcctgcggcggcggcacaattggattatgacgaactcgaactgagcattggtgggtgtgggggcgggcatggattctcacgccagggagacgggagcgtctatgagcacatgaagggcatgttctaa

SEQ ID NO: 4223 - protein, 956 aa, Myceliophthora thermophilia
MTDDITDCSQEDSPRSSSIESFQYAGNSNWERPGKPVALTHQGKGGSRGGRGLENAPRLARSSSAATRLLIGSDHSRSAQHWFTRRHAGSKVARVHSRESMDLLENQVSDLRSFLGAGAAEVAAPQGPDTAPAPAHDVAGCAPSPSGAPLRSTSSHRSSLSALGDNSAPHHHHQPLSPPGSGSNINGSAKKRVNEAEDGPAKQQRSKRNRYISIACNECKRRKIKCNGQTPCQRCGHLNLQCLYAPNCCSNFKDSDEFRQMADQVRQLQQQVDTLFTSLESLRQETARLAPLQDRVLPLPSAAAPAASPLTSSSTQSRPALAFRVPSFFNGPTSSAFSVGVAKNTLKTMGYSGAGDASEDSGTLPDATPQTSPMLAPVSSGAPLPQGQAPADPIWELDEPEMMRLLQVYREEVDAMYPVTSVHSVEEHIKYIAAWMDTARRTGTMQSPGSAEVIQDTKTLLLKIVLCCALMVDEHGNSDRAARLYESIQPTVDKMLMTQPADVTKLPFLALCAGYRYLSNDEVLAWRMMGHVARLCFELGLHRREGLQNITDPALRRDALHTFWAAYILDRRWSFSTGLPFVCHDDKIDPRLPYPEGYPFLVAMIGHARLGAKIWRLVDYFEPAIVRELKPRDFEELDREIMDWYESVPEEVKTGPLDVDKMSVPSGPYDIQRLRIWTRLRLNQVRIWLYTPVLHSAISILNNAPLAQRVVDLAKETIRLLARLNNETDFYRRIQVFYHQFLTSSIAVLFLASTHAPLQFSANCREEFYMALDLVKELSAKSWVSQRLWRTIRSLRAYAPRLGLEDNPGRTAASGTSPYAHAGSGSTGHSPGLSASFNGGGSAVSPSPAKGPAATAPTNASAVPTPGSTRPMQLDDSLSNGLRLQSEMSRIYEGYTCVTSAVGAESTTGSNSIPGPAAAAQLDYDELELSIGGCGGGHGFSRQGDGSVYEHMKGMF

SEQ ID NO: 4224 - DNA, 534 bp, Myceliophthora thermophilia
atggccgcttctcagcaacaacagaccgccgcccagggccccgttaacaacgacgacattgccgactggacggcgcgtttcaacgatgtcctggcccggcccggcgagtacctcaactcccagtcgccgcccaacgcgcagccgtggtaccactctttctttggctgcttcaaccccatcgacacctgcctgctggcctactgctgcccttgcgtcgtctttggccgcacccaccaccgcacccgcaagaacgccaatctcgaaggctacgagcccatcaacacttcgtgtctcctcttctgcgccacgggctgcttcggtctccactggatccccatggccatgcagcgcgccgacctgcgcaccaagcacaacctccagggcagctgcctcctcgacatcgccggtgcctgctgctgccattgctgccagctcattcaggatgacaaggaggccgcgcaccgggagccgctgctcgtccagcagcagggctaccaggcccaggccggcatgaccttccctggcaagcagtaa

SEQ ID NO: 4225 - protein, 177 aa, Myceliophthora thermophilia
MAASQQQQTAAQGPVNNDDIADWTARFNDVLARPGEYLNSQSPPNAQPWYHSFFGCFNPIDTCLLAYCCPCVVFGRTHHRTRKNANLEGYEPINTSCLLFCATGCFGLHWIPMAMQRADLRTKHNLQGSCLLDIAGACCCHCCQLIQDDKEAAHREPLLVQQQGYQAQAGMTFPGKQ

SEQ ID NO: 4226 - DNA, 1044 bp, Myceliophthora thermophilia
atggttgttgcggctcagtttcccgatcaacaccgcaagaggttcagagaagaggatggggacacttcttcgacctatccggtcggattcactgaacacagaaccaaacgcctccagtccctcccgcttaggacgtctccggactcgaaacaatggttcgatcgaccgagcttccggcagccgaacgctttcgccgccacgagcaatgttcaaaccatcacaccggaggagccgatagaggagcacatgtgggcagatgagcctgaactggttccggccgcaccacagctcgacaacgacctggacatgatggacatggcagattcagtcgcgagccgtgaccagacaggcctcgagggtcagattcgcgatggacaggtttcatctcgcgcggatcgagacgcacccagcgtgactggccgcataccgacgccgatccactgcagttttgcggcgcaagtccggggcaacaactggaacggcggaaacgcgggccacggcgatagccttccggcaacgctcgaagagcagagtgcagcagccttagacaataatcagctggtggacatatctacccagaagtatacctcggcaacagccacacaggccatggcagactggagcgtggtccagaaccggcgactcccgtcgcccatcagcgagtgcggggcggaagaaagccaagggagtgcaaggatggcgctggattcgccatcttcgcacggtgacagcttgagccgcgttacgcatgagcaccccttggtggccgggctcccgctccgcggaagctctgcaatgccagcgcggtcgggacgggaaggcacccccgcggtcgacagtcacggtggcaatgccatggatgtcgagtcttcggtcacaccatcactgccgaagaagggacacaccaggtccaagcacacgctgaactcgtggacggcattgcaacccggcatgacgcggacgttcagcatagggtaccgagcggactgcgaacggtgccggaacaaggtgccaggccacttcaaccacatcatcatctcttag

SEQ ID NO: 4227 - protein, 347 aa, Myceliophthora thermophilia
MVVAAQFPDQHRKRFREEDGDTSSTYPVGFTEHRTKRLQSLPLRTSPDSKQWFDRPSFRQPNAFAATSNVQTITPEEPIEEHMWADEPELVPAAPQLDNDLDMMDMADSVASRDQTGLEGQIRDGQVSSRADRDAPSVTGRIPTPIHCSFAAQVRGNNWNGGNAGHGDSLPATLEEQSAAALDNNQLVDISTQKYTSATATQAMADWSVVQNRRLPSPISECGAEESQGSARMALDSPSSHGDSLSRVTHEHPLVAGLPLRGSSAMPARSGREGTPAVDSHGGNAMDVESSVTPSLPKKGHTRSKHTLNSWTALQPGMTRTFSIGYRADCERCRNKVPGHFNHIIIS

SEQ ID NO: 4228 - DNA, 414 bp, Myceliophthora thermophilia
atggttaagaacggaggtgacttcgacctcgacatcaacatagttactaacaagttagttaacgaggcctatgctaaaatcgaggcacttaagggcgctaaagcaaagcgtatcaagatcgaactgcctagtaaatatagaggaactaaggaggatcttgtaggattcctgacaaacctccgatcctacttccggcttaatgataacaagtttctggacgacaaagctaaagtcctctatatagctacaagactagagggcaaggcagtcttccgatcttataaccgtttcgaagaagagcttcggaaagtttttggtgacaaagacaagaagattcataccctaaaggaaaaggttaaagacgagctatataagtacgatcggcctaagactctagataaatacatcgtatag

SEQ ID NO: 4229 - protein, 137 aa, Myceliophthora thermophilia
MVKNGGDFDLDINIVTNKLVNEAYAKIEALKGAKAKRIKIELPSKYRGTKEDLVGFLTNLRSYFRLNDNKFLDDKAKVLYIATRLEGKAVFRSYNRFEEELRKVFGDKDKKIHTLKEKVKDELYKYDRPKTLDKYIV

SEQ ID NO: 4230 - DNA, 2673 bp, Myceliophthora thermophilia
atgggaaatgcaagcacgaaagaatcacgctcgggggatggtagcaatcgtatccatcaccccggctccgccggcgctcgcgacgccgggagtgcttctcttcaatccgacagagcatcgagccgcaggaaccgggttagtcgcggcgacttgggagggctcttaggactggcatcgggtggaggttcaagctctcaggcggaaacgccgcatgagcgccgcgagaccaagcaggagcgggaagcacgaaggctggagagggagcgcatagcgagaatcgccgagagagagcgaagcatgagagaagaacacgtcgatggcggctacttggtcactatgggaacatactcgagcccagaggacttcaacaagcagatcgtccgacaacttcagatcgagcgcaaactggcccccttctggcgggggcttaacgacttcgatgaccaatggaccgagccacaaatcattgctgccgcacgagggctaccgattcctcccgccgaccaaaccccccccgatgacctcattccgcgcccacttccaacgactcatgcgcccgaatcaagtcagaatccggataacctgactgtaccgatcggcgaccgctccctgtcaactgcctccgaccacgccacgtccaatccgccctctacgctgtcatcacctgtctccagccacgccccaagggcaagctccccattcaagcctcgcggcaaagctattgccgccgttctcggtggaggaaactctcgtaacggatccagtaccgatatcatgccccgcgagatcaacctcccgcatgatcctttcgtcaacggacagccgatcgaagtctttctatacaagaacgccatcgagtgccccatctgtttcttggcttacccgccctatctgaaccatacccgctgctgcaaccagcctatatgcagcgaatgcttcgttcagatcaagcggccagacccgcacttcccggagggacacaacgagaatgatcccaaccacgaccctgaggaaagtgcatgcctcctagtatccgagcctgcgtgctgtccgtactgcacacaacccgactttggtgtgacatacgatccacctcccttccggcgcggcttggtatacagcatgtctccggctgcgttgggaaccacgagcgccgccatgtcttcgagcagctcggtaaattcggctaccctgtcaccagccagcggatcccctaataatgggaccggccgccgacgcaaccagtctgtgtctgccaacgaccccaatgtcgttctaacagatcggattcggccggagtgggcatcaaagctgcaggcggcacgggcgcatctagcaaggagggctgccgctgcaactgcgttgcacacggcggcgttccttataggcggctccgagaaccgggcattccgtagtcgattcagccggaggaacacaggggggtctgggtctgcaggtgcgtcgcctagtggcccgaaccagggagagggcgagaatggggatagtggatccggaactccttcacagaatggccctgatcagaaccctcggggatctagtcgtggctggtcgggcggtggtgctggcgggagccgccgcagtcgccttgaagacctcgaggagttgatgctagctgaggccgtccgcttgtcgcttgccgccgaagaggagcgcaagcggaaggcagaaaaggaggagcgaaaagaagcgaagaagcgggaaaaagaggagcgcaaggcggccaaggcggctgcaaagcacgccggaccttatgagggcgccggcagtggtcaaacatcggccagtggcagtgccctcagtctgcctggccttggttttggaaggaggcggggtaatagtggtgccagtaatctgcggattgaagccagcgttgccaatgcgatggtcacaggcgagtctccggaagcgggccagaaggataaaggaaagggcgtcgaccgcggcgcccccgcgcacaccgagagcgcccctgcgtctacttctgatccagcgggtgcggctggcacctcaggtcctcccccagttccgcacctccccgcaggcccgtcgcaccttcgacaaatgagcaatgcctcctctgtctcctcatccatacttgacagccagcacggcagctttacctcgccctcccatctccaggatccccgcggcagtggtgtcagtctagggagccggtcaggtgctagcgaagatggtgaccaggaccgagatcgggatcgtagcgccagcacggagccaatattcaacttcaggagcctggcagaggtggttggtgttagtctggaaggggaaaacgccggcagacgtcttcgcctcactgaagccgagaaaaaggcaggggagtccggggagatgggaccgcaaaaaggcgacggggatggcgatggtgtgaacgtaacaccaccggctgatgtcccgggtagccacctgacgccgccggcaggggcggcggcgagcagtgcttataaagatttggaagaggacataccagatgtccagaagaacactcctagagcccccgacgcattatttccgcctacggtcactattacacccgacacgcccactgccgccggtgctgatgaagagtcaaagcagcttggttgcgagactaccatggagcatgagcctcgggcgacggcagcccagtag

SEQ ID NO: 4231 - protein, 890 aa, Myceliophthora thermophilia
MGNASTKESRSGDGSNRIHHPGSAGARDAGSASLQSDRASSRRNRVSRGDLGGLLGLASGGGSSSQAETPHERRETKQEREARRLERERIARIAERERSMREEHVDGGYLVTMGTYSSPEDFNKQIVRQLQIERKLAPFWRGLNDFDDQWTEPQIIAAARGLPIPPADQTPPDDLIPRPLPTTHAPESSQNPDNLTVPIGDRSLSTASDHATSNPPSTLSSPVSSHAPRASSPFKPRGKAIAAVLGGGNSRNGSSTDIMPREINLPHDPFVNGQPIEVFLYKNAIECPICFLAYPPYLNHTRCCNQPICSECFVQIKRPDPHFPEGHNENDPNHDPEESACLLVSEPACCPYCTQPDFGVTYDPPPFRRGLVYSMSPAALGTTSAAMSSSSSVNSATLSPASGSPNNGTGRRRNQSVSANDPNVVLTDRIRPEWASKLQAARAHLARRAAAATALHTAAFLIGGSENRAFRSRFSRRNTGGSGSAGASPSGPNQGEGENGDSGSGTPSQNGPDQNPRGSSRGWSGGGAGGSRRSRLEDLEELMLAEAVRLSLAAEEERKRKAEKEERKEAKKREKEERKAAKAAAKHAGPYEGAGSGQTSASGSALSLPGLGFGRRRGNSGASNLRIEASVANAMVTGESPEAGQKDKGKGVDRGAPAHTESAPASTSDPAGAAGTSGPPPVPHLPAGPSHLRQMSNASSVSSSILDSQHGSFTSPSHLQDPRGSGVSLGSRSGASEDGDQDRDRDRSASTEPIFNFRSLAEVVGVSLEGENAGRRLRLTEAEKKAGESGEMGPQKGDGDGDGVNVTPPADVPGSHLTPPAGAAASSAYKDLEEDIPDVQKNTPRAPDALFPPTVTITPDTPTAAGADEESKQLGCETTMEHEPRATAAQ

SEQ ID NO: 4232 - DNA, 1386 bp, Myceliophthora thermophilia
atggcccagctattaacgcctcgacaggctgaggagctacaccgagccctcattgcctatctgacctccaacaacctgaccagtaccgctgccgctctcagagccgaactcggtcttggggaagatgtcttcgatgccgctacagcaaagaagtatgaaggcctcttggagaagaagtggaccagcgttgtccggttacagaagaagataatggatctggaagcccgcaatgctgccctgcagtcagaactcgacaactcgactccgacatcacggcagaataaagacccagtcaactggttgccgaaatcccctgcgcggcacacgctgcaatcacaccgcagccccatcacatgcgtcgccttccacccggtcttctcctcgctagcttcgggctccgaggaccagaccatcaagatatgggactgggaacttggagagctagaacggacaatcaaaggccataccaaagctgtattggatgttgattttggtggcccgcgagggaacacactcctcgcctcatgcagttcggatctcaccatcaaactctgggacccgtcagacgactataaaaatatccggacattgcccggtcatgatcacagcgtcagtgccgttcggttcatcccctccggcgtcgcgggcggcgctgggaatctcttggttagtgctagccgagataagacgctcaggatatgggatgtgagcacgggctattgcgtcaagacattgcgaggacacgctgagtgggtgcgcgatgtttgtccctcgatcgacggcaggttcatcctttcaacaagcgatgactatacaagccgactgtgggatgtatcgatagcaaacccagagccaaagacaacgctcatcggccacgagcacgtggtgctctgctgcgcaatcgcgcctgccgcttcctatcctcacctggcggctatcgccggagtcaagaaaccacccgccaccagcgcggtcgagtttatggcgactgggtcaagggacaagaccatccggctctgggacgctcggggcacatgcatcaagattctagtcggacacgacaactgggtgcggggcctcgtcttccacccaggcggcaaatatctcctctcggtctctgacgactacacgctgagatgctgggaccttacacaagaagggagatgtgtcaagacgatatcggacgctcacggtcactttgtgcagtgcatccggtgggccccttccgtcgtcaaggatgtccccgtggttaacggtggggatgggcaaggtgccgagacaaatggcacgccgaagaagtcatcgggggccgtcgaggcccagcaaatccgctgcgttatcgcgaccgggagcgtcgacctcaacgtaaggatctttgccaattga

SEQ ID NO: 4233 - protein, 461 aa, Myceliophthora thermophilia
MAQLLTPRQAEELHRALIAYLTSNNLTSTAAALRAELGLGEDVFDAATAKKYEGLLEKKWTSVVRLQKKIMDLEARNAALQSELDNSTPTSRQNKDPVNWLPKSPARHTLQSHRSPITCVAFHPVFSSLASGSEDQTIKIWDWELGELERTIKGHTKAVLDVDFGGPRGNTLLASCSSDLTIKLWDPSDDYKNIRTLPGHDHSVSAVRFIPSGVAGGAGNLLVSASRDKTLRIWDVSTGYCVKTLRGHAEWVRDVCPSIDGRFILSTSDDYTSRLWDVSIANPEPKTTLIGHEHVVLCCAIAPAASYPHLAAIAGVKKPPATSAVEFMATGSRDKTIRLWDARGTCIKILVGHDNWVRGLVFHPGGKYLLSVSDDYTLRCWDLTQEGRCVKTISDAHGHFVQCIRWAPSVVKDVPVVNGGDGQGAETNGTPKKSSGAVEAQQIRCVIATGSVDLNVRIFAN

SEQ ID NO: 4234 - DNA, 7617 bp, Myceliophthora thermophilia
atgtcgatcatcaaagatcaagcggccactgcgctggaccagtacatcaaagaagtcaggaatcggtgcgttgccctgctcccgccaatgctctcgctgaaggaaccccatctcgaacattgcttgctaacgcgcgccgtatgtgataggaaccatgcggaggatcagcgcaagcgcgccgcgcgccaggtgcgggacctggtcaacatcgccaaacaagagatgggaaccgaacagttccagcggttctttgacaccgtcaaccagaggaccatggcgctgatccaaagcaccgacacgtacgacaagatgggcggtgtctacatcctggatgccttggtagacttcgagggcatagagcccgcgctgaaatacagccgcttccagcagtacatcggaacaatcttgcgcgggaaggatctcaaccctatgcagcctgccgccgtggttcttggcaaaatgtgcaagccaggcggctctctgatctccgagcttgttgatgcggagatgcacactgcgctcgagtggctgcagtcggaccgcgtggaggagagacgatacagcgcagtccttgtcctccgcgagctggcgaggaacgcgcccacattgatgtatccctacgtcggtttcgttttcgatcaaatctggatcggcctacgagatcctcgccatctgatccgggccacttcgagcgaaaccgtcagtgcctgcttcaaaatcatccgggagcgtgaccaggagatgaagcaagaatggatggacaagatgttcaacgaagcggtcaagggcctcaaggtgaacacggttgaatatatccacgcctcactccttgttctcaaggagcttctcgaacagggcggcatgtacatgcagagccactatcaagaagcctgcgagatcgtcttccgtcacaaagacgcgcgcgacccggccatccgcaaaacggtcgtcttcctcatccccgatttagccaactatgctccaaccgagtttggagccacttacctgcacaagttcatggtctacctatcgggtatgctcaaaaaggagaaggaacggaacgatgcgtttctcgccattgggaacattgcaaactccgtcaagagcgccatcgcgccgtacctagacggtgtcctcatttatgtccgcgaaggcctcagtgtgcagtcccgcaagcgaggttctgtcgatccagtctttgactgcatcagccggctcgcggtggcggtgggccaaacgctgagcaaatacatggaggcgctgctggatcccatcttcgcctgcgagctgacgccgaagctgacacaggccttggttgacatggctttctacatcccgcctgtcaagggcaccatacaagagcgtcttctcaacatgctgagcaaagttctgtgcggcgagccgttccggccacttggagcacctcatctgaacccaccctcttccattccacccatacctaaggatcctaaagatccatctgtgcatgagcgtggcaaagccgaggtgaagcttgccttgaacacgctcggcagttttgacttttcagatgcacgaaagactcactccaaggaacacgtactaacatcgcgtgaaggccacgtcttgaacgagttcgtccgtgatgttgccatcaaatacgttgaggatgacgaccccgaaatccgcgaggctgctgccctcacttgctgtcagctctatgtccgcgacccaatcgtcaatcaaacaagctatcacgctctgcaagtcgtcgccgatgttgttgagaaactgttgaccgtgggtgtctcggaccctgaacccaagattcgccgaacggtgctcgccgccctcgatgagcgatttgaccagcacctcgccaaggccgagaatattcgaacgctgttcttcgccctgcacgatgaacagtttgcggtgagggaagtcgccgtgtcaatcattggtcgactagctcgtcataatcccgcatacgtcatcccccagttgcggaagaccatcatccagatgttgacagagctcgaatacacggacgtggcgaggagtaaggaggagagctcaaagctgctaagcctcctgactcagcatgcccaagacctggtcaagccatacgtcagctccatcactgaagtcctcttgccgaaggcctctgacccaacgccctctgtcgcggcaaccgtcctgcaggccattggcgaactttgcacggttggcggtgctgagatgcttgctaagaaggatacgctcatgccgattatcattgacgcattgcaggatcagagcgcacccatcaagcgagaagcagccctccataccctcggtcagttggctagcaatgctggctatgttatcaagccttacctcgaatacccacagttgctcgagattttgcaatccatcattcgaggcgaacctcagcatggtcccctgcgacaggagacgatcaagctcatgggtatccttggcgcgctggatccttacaaacaccagcccaccatcacacccatatctctgttgtcgtgtgccagtcccagccaagcagattcggacgacgaggatgacgagactgggcacggcagcttctttcccctttcttccctgaagtctcaaggacgcaaatatgcattcaggggcagagctaaaaccagaaaacagcaggttgaagagcgaacaccgcaaacccagcgtcgccccgaggctacccaattaaccgatgtctctctcatgatgagcggacttacgccgtcccaagaggactactaccccacggtcgtcatcaatgccctgcttcaagtcctgaaggaccaatccttggtgcaatggcatggaaatgtggtggatgcaatcatgagcatcttcatcacgctcggactcaaatgtgttcagtttctcgaccgggtagttcccgctttcatcgctgtcatcagggcctcgagcccagcgagactcgactactacttcaaccatctgagcagactcgttggtattgtgcgtcaacatatccgcgtctacctcccggacatcattgaggtgctgcaggagttttggaacacaacgtcctcactgcagactaccatcatctcactgattgagtcgatcgcccgttccttggagggcgagttcaaaatctatctggcgagtctgcttccattaatgctcggggttttagagagggacacgagcaccaaacgccagccaaccgagaaaatattccatgcatttctggtgtttgggtctagcgcggaggaatacatgcatctcatcattcccattcttgtgcgcctattcgacaatccagcgcagcccatgttcctgcgaaaatcgtcgatcgagacgatcggaaagctttcgagcatggtcaacctcaatgactatgcatccaagattatccaccccttgaccagggttctagccagccaagaacctagccttcgcgtcgctgcacttgacacgctctgtgctctcatgttacagttgggtcgcgactaccttcattttgagcacacggttgaaaagaccatcaccatgtacggcatccaacactccaactacgacaaggccgtggaaaagctcaagaagggcgaggctctccctcaaaacctagctccccggtttgaggacacatctctggaacagttcacgtccgagaacaacccgccaaaaaaactcgacttgaatccagttcacctgaagcaggcatgggagacaaaaggaaaggctaccaaggacgactggcacgagtggttccgcaagtttagtacaaccttactttcagagtcgccgaaccactcgctccgagcctgcgccagcctggcaagcaactaccagcctcttgctagggagctcttcaattctgccttcgtctcctgctggagtgagctctacgattcgtatcaggaggagctcattaccaatatcgaaaacacgatcaagtccgaaaacgtgccgcccgatctcctaggccagcttctcaatctcgcagagttcatggagcatgacgacaaggcacttcccatcgatatccgcatcttgggacgcgaagcggctaggtgtcacgcttacgccaaggcactccactataaggagctcgagttcctgcaggaccataacagtcacgcggtcgaggcgctcatcgttatcaacaaccaactgcagcagtctgacgccgccatcggtatcctgcgcaaagtcaaggcgtacaaggacggtatccagctgcgagagagttggttcgagaagctagagcggtgggatgaggcgctcaatttctactgtcagagagagcgggaactccctgaagaccagccaacacccgtcgatatcgtcatgggcaagatgcgctgctatcacgcgttgggcgagtgggactcgctcgcctccttggctggcaagacttgggcgaactctggcccggagattcagcgaaggattgcgcccttggcaactacggctgcatggggtcttgggaagtgggattccatggacacctacctgcagtcgatgaaacgttactcgcccgatcgcgcattcttcggggctattcttgccctgcaccggaaccaattccgggaggcgctagcctgcatcgagcaggctcgtgagggcttggatacggagcttagcgctcttgtaagcgagtcttacaaccgcgcttaccaggtcgtcgtgagagtccagatgcttgccgagttggaggagcttatagtctacaaacaatgtggccctgagaagcgtgccacattgcgagccacttgggagactcggctcaagggctgccagcgcaacgtcgaggtctggcagcgaacgctccggctgcgctctctggtgctcacgccgcaagagaacatgcacatgtggacgaagtttgccaacttgtgccgcaagtccgggcgtatgggcctagccgagaagtccttgaagcagctcattgacactgatgctccgctggaatcggtcatcccttactgggctgaccagtcacccaacccaggtgttgagcgcatcgcacctccaattgtgtacgcagtgctcaagtatcagtgggaggttggccagcagccaggtgttcgaaatacggaccgcagcatcgcggaacgtaccctctactgccttcacaggttcaccgaggatatggcccgcagagtggagagcgcaagactgcagttgaatgcctctacgcaagctgtcaacggcatgggcgacggcctgaaccacgccagatacaccgactacgacgaggcagcggtccttggcccggatgcacaacatcaattgcttgaacagacggtgctgctcgcaaaatgctacctccgacagggtgattggatgatcacgctgaacaagaacgactggcaacacacacggcgccaagacgtccttgactgttattccaaggcaacgcactatcatccccggtggtacaaggcctggcatgcttgggctctggccaatttcgaggttgtccaagctctgacctccaaaaaggagttggaaggaaggtccgaacatagcatcattgtccaccatgtggtgccagctgtgcatggcttcttcgaatccatcgcactctcctccggaagttccttgcaagacaccctccgcttgctaactctctggctcacctatggtggctaccaagaagtcatcaccgccgtcaccgacgggttcgcgcacgtcagcatcgacacctggcttgaggttataccacaactcattgcccgcattaaccaaccaaacagacgggtccaggcgtctatccacgctctcctgtccgacgttggacgcgcgcaccctcaggcgctggtctacccacttactgttgcgatgaagtcgcggcagagtacacggaggtctaagacggccagcgcgatcatggagagcatgcgtcagcacagttccaagcttgtggaacaggccgatcttgtgagccgcgagcttatcagggtcgcggttttgtggcacgagctctggcacgaggggcttgaggaggcctcccggctgtactttggcgatcacaatatccaaggcatgttcgacgtacttgagccactccacgacctgctcgagaaaggaccggtgacgctgcgggaaatctcattcacccagacatttggtcgcgacctaagtgaggcacgtgaatggtgccgtcagtatcgccattcccaagacgtgaacgacatcagtcaagcgtgggatctctactatcaagtcttccggcgtattagccggcagctaccccagatgacaagccttgaactaacatactgttcgcctgacctgcttcaggctcgtgacctcgagcttgcagtacctggaacataccgtagcggacaagagattgtgcggatcaaggcctttgatggaaccctcagcgtcatcagctcaaaacagcgtccgcggaaagtcgtcattctcgggagcgatggcaaaacatacacattcctgctcaagggacacgaagacagccggcaggatgagcgtgtcatgcagctcttcggcctgtgcaacactctcttggccaacgattcagagtgctacaagcggcacctcaacattcagcgctacccagcgattcctttgtcgcaaaactcgggcctctttggctgggttcccaacagtgacaccgttcaccaactcatccgggagtaccgtgaatcgagaaagatcctcctcaacattgagcaccgaatcatgcttcagatggcaccagactacgataacctgacgctgatgcagaaggtcgaggtgtttggatatgcgctggacaacacgacgggtcaagacctataccgggttctctggcttaaaagcaagagctccgaggcctggctggaccggagaacaaactatacacgctccttgggcgtcatgtccatggttgggtatattctgggtctgggagacaggcaccctagtaatctgatgctggaccggatcacaggcaagatcatccacatcgacttcggcgattgcttcgaagtggccatgaagcgggagaagtacccggagagggtgcccttcagactcactcgcatgcttacctatgctatggaggttagcaacatcgagggcagtttccgcattacatgcgagcatgtgatgagagtcctgcgggataacaaggagagtgtcatggctgtcctggaagctttcatccatgatccactcctcacatggcgccttacgaatcctgccagtccggctggacctcacttcaactcggaacgagaacaagcgattgctggaccacaggcagggcgcgcgcgtcggccatcgattctcgacggtcccgtggctcctacagagttccttgctgcccagggcgccgcggcggatggcatgatggccccaccaccaggggcccggggcagagcaaggactaactcctctgctgtagcaccgggcagtctggcaaacggcaacggggccaacgacatggctgaagtgcaaaatgcacgagcagttgaggtgctcgacagagtcacccagaagctcaccggccgtgacttcaaaccacatgaggagctcaccgtcaatgagcaggtcaacaagcttatcattgaggccaccaagctggagaacctctgccaacattacattggatggtgtagtttctggtga

SEQ ID NO: 4235 - protein, 2538 aa, Myceliophthora thermophilia
MSIIKDQAATALDQYIKEVRNRCVALLPPMLSLKEPHLEHCLLTRAVCDRNHAEDQRKRAARQVRDLVNIAKQEMGTEQFQRFFDTVNQRTMALIQSTDTYDKMGGVYILDALVDFEGIEPALKYSRFQQYIGTILRGKDLNPMQPAAVVLGKMCKPGGSLISELVDAEMHTALEWLQSDRVEERRYSAVLVLRELARNAPTLMYPYVGFVFDQIWIGLRDPRHLIRATSSETVSACFKIIRERDQEMKQEWMDKMFNEAVKGLKVNTVEYIHASLLVLKELLEQGGMYMQSHYQEACEIVFRHKDARDPAIRKTVVFLIPDLANYAPTEFGATYLHKFMVYLSGMLKKEKERNDAFLAIGNIANSVKSAIAPYLDGVLIYVREGLSVQSRKRGSVDPVFDCISRLAVAVGQTLSKYMEALLDPIFACELTPKLTQALVDMAFYIPPVKGTIQERLLNMLSKVLCGEPFRPLGAPHLNPPSSIPPIPKDPKDPSVHERGKAEVKLALNTLGSFDFSDARKTHSKEHVLTSREGHVLNEFVRDVAIKYVEDDDPEIREAAALTCCQLYVRDPIVNQTSYHALQVVADVVEKLLTVGVSDPEPKIRRTVLAALDERFDQHLAKAENIRTLFFALHDEQFAVREVAVSIIGRLARHNPAYVIPQLRKTIIQMLTELEYTDVARSKEESSKLLSLLTQHAQDLVKPYVSSITEVLLPKASDPTPSVAATVLQAIGELCTVGGAEMLAKKDTLMPIIIDALQDQSAPIKREAALHTLGQLASNAGYVIKPYLEYPQLLEILQSIIRGEPQHGPLRQETIKLMGILGALDPYKHQPTITPISLLSCASPSQADSDDEDDETGHGSFFPLSSLKSQGRKYAFRGRAKTRKQQVEERTPQTQRRPEATQLTDVSLMMSGLTPSQEDYYPTVVINALLQVLKDQSLVQWHGNVVDAIMSIFITLGLKCVQFLDRVVPAFIAVIRASSPARLDYYFNHLSRLVGIVRQHIRVYLPDIIEVLQEFWNTTSSLQTTIISLIESIARSLEGEFKIYLASLLPLMLGVLERDTSTKRQPTEKIFHAFLVFGSSAEEYMHLIIPILVRLFDNPAQPMFLRKSSIETIGKLSSMVNLNDYASKIIHPLTRVLASQEPSLRVAALDTLCALMLQLGRDYLHFEHTVEKTITMYGIQHSNYDKAVEKLKKGEALPQNLAPRFEDTSLEQFTSENNPPKKLDLNPVHLKQAWETKGKATKDDWHEWFRKFSTTLLSESPNHSLRACASLASNYQPLARELFNSAFVSCWSELYDSYQEELITNIENTIKSENVPPDLLGQLLNLAEFMEHDDKALPIDIRILGREAARCHAYAKALHYKELEFLQDHNSHAVEALIVINNQLQQSDAAIGILRKVKAYKDGIQLRESWFEKLERWDEALNFYCQRERELPEDQPTPVDIVMGKMRCYHALGEWDSLASLAGKTWANSGPEIQRRIAPLATTAAWGLGKWDSMDTYLQSMKRYSPDRAFFGAILALHRNQFREALACIEQAREGLDTELSALVSESYNRAYQVVVRVQMLAELEELIVYKQCGPEKRATLRATWETRLKGCQRNVEVWQRTLRLRSLVLTPQENMHMWTKFANLCRKSGRMGLAEKSLKQLIDTDAPLESVIPYWADQSPNPGVERIAPPIVYAVLKYQWEVGQQPGVRNTDRSIAERTLYCLHRFTEDMARRVESARLQLNASTQAVNGMGDGLNHARYTDYDEAAVLGPDAQHQLLEQTVLLAKCYLRQGDWMITLNKNDWQHTRRQDVLDCYSKATHYHPRWYKAWHAWALANFEVVQALTSKKELEGRSEHSIIVHHVVPAVHGFFESIALSSGSSLQDTLRLLTLWLTYGGYQEVITAVTDGFAHVSIDTWLEVIPQLIARINQPNRRVQASIHALLSDVGRAHPQALVYPLTVAMKSRQSTRRSKTASAIMESMRQHSSKLVEQADLVSRELIRVAVLWHELWHEGLEEASRLYFGDHNIQGMFDVLEPLHDLLEKGPVTLREISFTQTFGRDLSEAREWCRQYRHSQDVNDISQAWDLYYQVFRRISRQLPQMTSLELTYCSPDLLQARDLELAVPGTYRSGQEIVRIKAFDGTLSVISSKQRPRKVVILGSDGKTYTFLLKGHEDSRQDERVMQLFGLCNTLLANDSECYKRHLNIQRYPAIPLSQNSGLFGWVPNSDTVHQLIREYRESRKILLNIEHRIMLQMAPDYDNLTLMQKVEVFGYALDNTTGQDLYRVLWLKSKSSEAWLDRRTNYTRSLGVMSMVGYILGLGDRHPSNLMLDRITGKIIHIDFGDCFEVAMKREKYPERVPFRLTRMLTYAMEVSNIEGSFRITCEHVMRVLRDNKESVMAVLEAFIHDPLLTWRLTNPASPAGPHFNSEREQAIAGPQAGRARRPSILDGPVAPTEFLAAQGAAADGMMAPPPGARGRARTNSSAVAPGSLANGNGANDMAEVQNARAVEVLDRVTQKLTGRDFKPHEELTVNEQVNKLIIEATKLENLCQHYIGWCSFW

SEQ ID NO: 4236 - DNA, 597 bp, Myceliophthora thermophilia
atgtggtaccaaactaaccccgtcacgaggggcgtcgcatctcgccacaatgcgcctcagctgagcggccacggcggcctcgatgcgaccagaacgctcatggttcggctgggcaaaggggttttgcaaccaagctttcttgaatacgacattcccgcagtcagcgagctcccctcctatgctgctgcgggtgcatttgcctgctcgctgcgggcgcccatcgcggaatgtctcaggttttcgctcggcgaccaagcttttgtggcagccactcttcgtgcctcctcggccgcagaatcggcggaagctccggggtttccaaccggggcatccttggttggccgaccacatcttcgaaggatatccgacttcagagctccggctggcgcaactctggtacacattccagcccgcgccggtgcgacggggatcgcaactacagcttccctctacccctccatccagcccccgtctcggccaacgggcaacatgggcagcatcgatcggcaggacgaccgcttcttgtgtcgggataacgggtttagtccgctgccgcaaaacgcccgggatgccgacagctccctggccaacgtgtga

SEQ ID NO: 4237 - protein, 198 aa, Myceliophthora thermophilia
MWYQTNPVTRGVASRHNAPQLSGHGGLDATRTLMVRLGKGVLQPSFLEYDIPAVSELPSYAAAGAFACSLRAPIAECLRFSLGDQAFVAATLRASSAAESAEAPGFPTGASLVGRPHLRRISDFRAPAGATLVHIPARAGATGIATTASLYPSIQPPSRPTGNMGSIDRQDDRFLCRDNGFSPLPQNARDADSSLANV

SEQ ID NO: 4238 - DNA, 885 bp, Myceliophthora thermophilia
atgggagacatgcatcaaatgagctccatagacattgaccgagaatttgtaatcgaggccgtcccgctcacgcgcgaagcctttgcgcctttcggagacgtggtcgagaacccgcggcccgatcttcacccctcgcgcgccgatccggcgtcgtcggctctccccttcaacgccgttgtcgccaaccaaggttctgccattaaataccagcatgtctcacggcaggtgaacctctacgaccaggccccgagcggccgccccgggtccgccatcatgagcatctttgtctgcgccgcccgcgcccgcattccggacccacctccggccccgggcgtcggtccggtccgcaacactgtcccggagcttcaactgccgtccatattccccgtcgccgtcctcgagcgccacccatacaccacccagactttcattcccctcacatccgatcccgcagcgcactatctcgttatcgtggccccctccctcccagccacccccgccgaggctccgagcggggaggcactgccggtgccggccagcctcccgcctgctacgggctaccctcgcacgctaccaggcagcggcatgcccgacctgtgccggctgcgcgcgtttgtggctaacgggacgcaggccgtcacctacggcgccgggacgtggcatgcccccatggtggccctgggtgagcccgggacggctctagacttcgtcgtggtgcagtttgcaaatggagtcggcattgaggactgccaggaggtctttctaaacggggctggggtcggcaccggcacagatgcagacgcagggcgcaaggggaagatttcggttgcgctcagaccgctgtcggggagtgaagggagaacaggggccagggccaagttgtga

SEQ ID NO: 4239 - protein, 294 aa, Myceliophthora thermophilia
MGDMHQMSSIDIDREFVIEAVPLTREAFAPFGDVVENPRPDLHPSRADPASSALPFNAVVANQGSAIKYQHVSRQVNLYDQAPSGRPGSAIMSIFVCAARARIPDPPPAPGVGPVRNTVPELQLPSIFPVAVLERHPYTTQTFIPLTSDPAAHYLVIVAPSLPATPAEAPSGEALPVPASLPPATGYPRTLPGSGMPDLCRLRAFVANGTQAVTYGAGTWHAPMVALGEPGTALDFVVVQFANGVGIEDCQEVFLNGAGVGTGTDADAGRKGKISVALRPLSGSEGRTGARAKL

SEQ ID NO: 4240 - DNA, 993 bp, Myceliophthora thermophilia
atggcggcggcgccggctggtgactcgcatccggcagacgccggaaacaagtttgaggatctttcggggatccaggccaagccgggtgagaacccgtacagcgctctcatcgacgcatgccatggctctccggccaagattcaggccctttacgccacccatcgtacgacgagaaacgcccagcagcgggagaagtttctgtgccccgagttcagcgggttggacattgaccccgtcctcttgcggctggaaaaacccgagattgagcccgggttcagagatccccgccattgcctcgtcttctgggcgaggccgccgaaccacattgtgaagctggcatgtcacctgcagtcgctgctgcaaaaagcggcgccaaatctctggctcatgccaccccaccgaatgcacttgactaccctcgagatcgcccactcgcgaacggcccgggagattgccgacttggtggcattgatgcggccggtgattccagctctgactggcatgacgatgcagcgccgctcgcggcttgtgaagcccatgatctcctacgacctctctgccgtggcagtctccttcctgccggcttcgggggaggaggtggtgtcaccaccgtcggacgacatcgtggaacttgacggtcccaaagacgacacgacaaggggggatcactacacctaccaccatctgcggcgagacgcattcgtcttggcctcggaaaccgtcccgatcagctcgcgatatgtcgtccccagcgcacacatcaccctgggccgctacctcacccaggacgaccatgagacgcccgagcagcgggagcggtgggttcgcactatcgatgacatcaacaagtggcttgagaatgaggtttgggacgtcaaggacggagagttcctcggcgagtggatcgtcggccaggaacgtggtctcgaggctcgatgcgggacggtgtggtatggtggtgggcgcaccctcctgatgggagaaggcttctga

SEQ ID NO: 4241 - protein, 330 aa, Myceliophthora thermophilia
MAAAPAGDSHPADAGNKFEDLSGIQAKPGENPYSALIDACHGSPAKIQALYATHRTTRNAQQREKFLCPEFSGLDIDPVLLRLEKPEIEPGFRDPRHCLVFWARPPNHIVKLACHLQSLLQKAAPNLWLMPPHRMHLTTLEIAHSRTAREIADLVALMRPVIPALTGMTMQRRSRLVKPMISYDLSAVAVSFLPASGEEVVSPPSDDIVELDGPKDDTTRGDHYTYHHLRRDAFVLASETVPISSRYVVPSAHITLGRYLTQDDHETPEQRERWVRTIDDINKWLENEVWDVKDGEFLGEWIVGQERGLEARCGTVWYGGGRTLLMGEGF

SEQ ID NO: 4242 - DNA, 1125 bp, Myceliophthora thermophilia
atgagtgccgacgagaccaaggcggctcgaagccgcgtgttcttcgatatcacgattggcggccagccggccgggcgcatcacattcgaactgtacaatgacattgtgcctaagacggctgagaacttccgtgctttgtgcaccggtgagaagggcgtaggcaaggccggcaagcccttgcactacaagggctcgatcttccaccgggttatcaagcagttcatgattcagggcggcgacttcactgctggcaatggcactggcggcgagtcaatttacggggccaagttcgccgacgagaactttgagctgaagcacgaccgtcccttccttctttccatggccaacgcaggtcctggaaccaatggctcccagttcttcatcaccactgttgccaccccccatctggacggcaagcacgttgtatttggcgaagtcctcagcgggaagtccgtcgttcgtcggatcgagaaccttaggacccagagcgacaaacccattcaggatgctgtcattgccgactgcggtgagctctcgccgtccgaagccatttccgccgacaccaaggccccggacgcctatggtgacgaatacgaagactatcctgaagaccaggtgacaggagacgaaacgctttctgccccaacgattttgaagattgcggccgattgcaaggaattcggcaataaggcgttcaaggccggcgaccttaacgttgcactcgaaaaatatcagaaaggtctacggtacctgaatgaggaccccgaccttgacaatgagccggaaggcactaaggagcaaatggacgcgctacgcatcagcctaaatagcaacgcggcgttgatgaacctgaagctcggcgcgtgggacgagactgttcgtgcggctgataacgctcttgaagtcgccggcatctctgacaaggacaaggccaaggctctctaccgtcgcggctttgcactggtgcgtttgaaggatgaggatggcgcgcttgagagtcttgaacaggcgaagaagcttgcgccggaggacgcggccatcgtcaccgaattggccgcagtaaagaaggcggccgcggctaggctcgccaaagagaaggccgcctataagaagttcttcagctga

SEQ ID NO: 4243 - protein, 374 aa, Myceliophthora thermophilia
MSADETKAARSRVFFDITIGGQPAGRITFELYNDIVPKTAENFRALCTGEKGVGKAGKPLHYKGSIFHRVIKQFMIQGGDFTAGNGTGGESIYGAKFADENFELKHDRPFLLSMANAGPGTNGSQFFITTVATPHLDGKHVVFGEVLSGKSVVRRIENLRTQSDKPIQDAVIADCGELSPSEAISADTKAPDAYGDEYEDYPEDQVTGDETLSAPTILKIAADCKEFGNKAFKAGDLNVALEKYQKGLRYLNEDPDLDNEPEGTKEQMDALRISLNSNAALMNLKLGAWDETVRAADNALEVAGISDKDKAKALYRRGFALVRLKDEDGALESLEQAKKLAPEDAAIVTELAAVKKAAAARLAKEKAAYKKFFS

SEQ ID NO: 4244 - DNA, 414 bp, Myceliophthora thermophilia
atggcacctggtgatacggaaaaggaggcagaatccttagccgccaaggtcctgaagttgaagctttgggatgatgactcaggggggcgttggaaaaggagtgttcaagatattggcggagaagttctatgcgtctctcaatttacgcttttggcctcgaccaagaagggtaacaagccagacttccacggcgcgatgggcggagacgacgccaagaagctatatgagtacttctacagcaaagtacaagagggatacgtggcagaaaaggtcaaggatggcgtgtttcaggccatgatgcaggtttcgttggtcaacgatggaccggtaacattggaaatttcggtatctccgaagcaggcgccgcagggtactagtaaagaggaaaagcccccaaaggttcgcgagccttga

SEQ ID NO: 4245 - protein, 137 aa, Myceliophthora thermophilia
MAPGDTEKEAESLAAKVLKLKLWDDDSGGRWKRSVQDIGGEVLCVSQFTLLASTKKGNKPDFHGAMGGDDAKKLYEYFYSKVQEGYVAEKVKDGVFQAMMQVSLVNDGPVTLEISVSPKQAPQGTSKEEKPPKVREP

SEQ ID NO: 4246 - DNA, 576 bp, Myceliophthora thermophilia
atggcaacggcaattccctcgatagcctgtcttggggtgattggccgcaataacaacccgctccacacgtccatcttcccctcctacgacccctctaccaactccttccaccccgtgcgcacgcccctccagttcgccctcatcctctcgagcacgctcgatatctttgaactccgttctcgccagaacgcggccgccggtgtcggtctgaccggcgactttggcctcctccacgccgtcgacgaccgcctcgccgcctacggtttcgagacaaacacgggcacccgcttcgtagccattgtcgatatgcgcggccgccgcatcgatggcgcgattgcagatgcgagagacaggagagctgccggcgcggccaccggcctgagggagggcgagatgaggcccgtgttcaaggccatgcagatggcttacacaaggctgatgcagaatcccttctttgacccggacgagcattcgccgcctacgggccatggtggcaaaaagattacgagcaggaagttcaccgaggagatgaggagaattggggaggcctggacgccaggggttgggagtctctga

SEQ ID NO: 4247 - protein, 191 aa, Myceliophthora thermophilia
MATAIPSIACLGVIGRNNNPLHTSIFPSYDPSTNSFHPVRTPLQFALILSSTLDIFELRSRQNAAAGVGLTGDFGLLHAVDDRLAAYGFETNTGTRFVAIVDMRGRRIDGAIADARDRRAAGAATGLREGEMRPVFKAMQMAYTRLMQNPFFDPDEHSPPTGHGGKKITSRKFTEEMRRIGEAWTPGVGSL

SEQ ID NO: 4248 - DNA, 1992 bp, Myceliophthora thermophilia
atgaaccgggccgcaacctcggttacgatcaccgaccctttcgtcaagtacacatccttgattgcgacaggggtgtactgcccagatgcggcccagtaccgtctcgctcaccacctgcagaaggtgtatgcgaggctgaaggactatgcaccctcgtacgagtaccggagcaggctccggcagatcgcaaaggtggttgagacgacaggcaaggacgatggggatgaactggcgtctccaacccacccgatccgccgcaatcctctcttcgcgcgcttctttcagagtcacgaaaggaaggatagtctggccttgacacgggtcatgacgagctatcaggctgccttgcacgtcgattctccgaaagggttgtttctctctggagaggtcggcacgggaaagtcgatgctcctcgacctcctcgccgaaggtttgccgacccatcgcaaaaagaggtggcatttcaataccttcatgctgcacatcttttccagactagaggagtttcgaaagtcccgtccccgtgaggccgctgatagcccggaacactctttgctgtggatggctaaagagcttgtggagacatctcctatactgttcctggacgagttccagctgccagacagggccgcgagcaagatcatgagcaatctgtttgttgccttcttccatcttggcggagtcctcgtcgcgtcttcgaacagaatgcccgaggagcttgaaaaggcaacgggaggctattactcgccgccggccactggtggtttggtcgatcgagtttttggtcttggcaggagccgatttaggggcgagctgtttggccgatctagcgactttgccgcctttctagaagttttgaaagcgcggtgtgacttctggcacatggaggggacgcaggactggagaaggagggagcgtcgtgcttcccttctagcgggatctacgtgcgctgctggttcagatccagggatcgcttcccaattgcaggggacaacaacaaacgagagcagtggctttgccatggacagagcagagagagaaactcagatgccaaccatgtacttctcaccatccgatggggaagagacatgggcagctgcactacggcacgcgacggggtttgatgttgaccatttggcgagtgcagaccgacagtggtcgtctgcaaccttggtagtgtacgggaggaaactagtcgtcccccgacaccgtgatggtgtttcgtactgggacttccccgagctcgtgggcacgctgggtccagccgactacatcacgttggcatgcaattatcataccttcatcattgaccacgtccctgtcctcagcctctccatgaagaacgaggcccggcggttcattactctcctggacgcactctacgagtcacggtgcaagctaatgattcgagccgaggccggccccgacgatcttttcttccccgagacaaggacacgggcagcggaactcgacgcggtgcaggttgccactagcgaggacgacggcacagatgcaacatactctgagacgattgccgaggtgttccaggatcaggtgtctccattccgcccaaatgtatcgacatactccgagtcctccaattccaagtacgacccagaccaggactcggatttcggaaaggagcaaggccgaaggattgattttagcaatacaagcgcgttcaccggcgaggacgaacgatttgcgtacaagcgggcgacgagtcgcctctgggaactctgcagcgcacagtggcacgcgcggacggggcaatggtggcagccgctgccgaaggaggctagacattgggagggtgctgagccctcgaagccgccgcctgcgccgttggcgcaaactgcgtcaagtgaagtcacaatgggggagtcgatcgagctggaagagcctgcgggcctggagaggtttcgggtcgcggcactgaggagaagcgagcagaacggacacagtcaagacgctgatatggctggccgctga

SEQ ID NO: 4249 - protein, 663 aa, Myceliophthora thermophilia
MNRAATSVTITDPFVKYTSLIATGVYCPDAAQYRLAHHLQKVYARLKDYAPSYEYRSRLRQIAKVVETTGKDDGDELASPTHPIRRNPLFARFFQSHERKDSLALTRVMTSYQAALHVDSPKGLFLSGEVGTGKSMLLDLLAEGLPTHRKKRWHFNTFMLHIFSRLEEFRKSRPREAADSPEHSLLWMAKELVETSPILFLDEFQLPDRAASKIMSNLFVAFFHLGGVLVASSNRMPEELEKATGGYYSPPATGGLVDRVFGLGRSRFRGELFGRSSDFAAFLEVLKARCDFWHMEGTQDWRRRERRASLLAGSTCAAGSDPGIASQLQGTTTNESSGFAMDRAERETQMPTMYFSPSDGEETWAAALRHATGFDVDHLASADRQWSSATLVVYGRKLVVPRHRDGVSYWDFPELVGTLGPADYITLACNYHTFIIDHVPVLSLSMKNEARRFITLLDALYESRCKLMIRAEAGPDDLFFPETRTRAAELDAVQVATSEDDGTDATYSETIAEVFQDQVSPFRPNVSTYSESSNSKYDPDQDSDFGKEQGRRIDFSNTSAFTGEDERFAYKRATSRLWELCSAQWHARTGQWWQPLPKEARHWEGAEPSKPPPAPLAQTASSEVTMGESIELEEPAGLERFRVAALRRSEQNGHSQDADMAGR

SEQ ID NO: 4250 - DNA, 4230 bp, Myceliophthora thermophilia
atgttttcttcggcgctgcaggaaggcgggcctgccaaaggtacacggagcagccgccgccgacagcgcacctccgaaccatcctcccagcagcagccaaaagcgaagcgccagagggtacccccagctgagacgtcgtctgccaatccggatccgcagcccgatatgtacgaagtcaagcctgacaagattgatctgcatgcgaccaaacgggacggtgtcgagactgttgctccgccgcgtaaggagctcagcgtgcgatccaagaaacccaaaccaggcgagaggagcaccaagggtgacggaagcattgtcctaacaacaaacaatgcgtttacggtgagcaagttgccggcgctaccagacagactccgggcagacgcgcaaagtaaggacaaggcattcctgatgcccaagggcggactgctgtgtagacaagatttgctaaactctttcaaagatcggcagcatggcgttgtcgactcgactaccggctacgctttgagcctcacccacacccacgccttcgtctggccctatacctcgacaacttcatcacccgaaacctttatattcaccctcccgtatccttcgaagcatgcttccgaccctctcccactcggatcccttgttaccccatcaacctcttcagatgaaccaggcttggtgatcgtcatgcctatgagcggcaaagttgcctattgggagtcgatttctagcgcagccacgctcgacttcatccgccaacaacggagcggtgtcgaagattcaatatccgggatgtattcaggcgagcatgtcacgcagatcgtgaacgccgggtcggccggatttgtgttggttttcagcagtggacggttggcatacttgagcgtgagggacgcacacggacgacctggaatcacagtccagttcctccggagcggcctgggcgggagcgcattgggttttttcggaaccatccgtcacgcccttagctcagcagccttccgcggtcagattgctgccgcccggactagccctggttccaaggtcggggagagggtggtggtcgcggcgacgtccaagggacggttgcactcttggaagatccaccgcggcggccatcacgaacttctatccgactccgatatccgagacagattggtcgaggccatccacgaagcggacccatccgtcagcaacttccctcaggactcgttcgaggtgctcgacttcactctggttccaaggggcctagagcaaaaatacgtcaatgccagccgattgagcgaagctttgactcatgaagaagagtctttgcaacatgctttgcttcttgcttcgttttcaagacagcatcggtctcggtactcgctggttgaggtgattttaacgccccaaggcccccgaatcggcatggtccggccggtggtctcatacaccagctctgtcagatctggggccccagagagacctcgcatctacctaccgcggcctggtcttatcgccttccttgtcttcgatagggcggtcgtagttgcctctatgattgcgccgccggactctcccgacgcgcagttgcaagaggataaccacatcttaccgcactccttcgaggacgtggtagacttcagagatgaggagaagcttcaggttgtcggttctggtgtcgaggagcccagtgggaatgggcaccctcaagacgacttgcggccgcatcgtcaccgaaccaaaaatcccacggtagtgctccttcttcaaggagttgggaccgttaggattgcggtctccgacatcgaccgttttgctagcgacacaccgccggaggtcactgcgaaaagcaagctggagcaggcggtgttctttggagtcaaagatgacaacccgctagtgtttcagggcaggagagatcttcccttctccagccaggaaattggaaacgcggccatcgaattgagccacgaaattgtgggctcaaagacaccttttatcgcgaatctgccggcctccctcgagaacaacatgaagagcagggtcgtctacctagatggtctgattgcctacctgaactcgctcaagatagacctggacattcgcacccggtggatgctgctgtacaatgccgagaaaatggcagttgcgacctggatatggcagaagcatgaacaatttcttgcggaacgccccaagggagagaagaagacactgatctccgagacagcggtctatatcaacgagcagcagaagacggagctcaacccggccgtcggtcaggtggatcccgtgcgtcactggtttattaacgacgtatggagactggatatcttcgtcgcttgggcttaccagatcatcaaatatcacttcaccgagcggctagcggatgaggccggcatcaaccggttagtatgggaggccgttacggtgaacaacggagctctctttgaggcccgtcagttccggctcaacagagcgaggcaatacggcgtcgacccaagcgacatcgcaggcggcaatgctattcctgaaccctggacagcgacctatttcatcacgaataacctcaagcgactggtcgagttctgttaccaatggcttgataggtactcgacacaaactcccgatgacgcgccgatcgacacccgcctcctcgattccatccgccatctcctaccttcgttaacgagccagtacctcacgtccctcgccgagttctccagctgggccgcgttaagcgacgatgcacaggcccaggagcggggcaaaacctaccagcagatcttccaagaagatgtgtacacgaagatcctgaggctaaaggacttcaacttgtgggaagaagccattgaccttgcaaaagagtacaaggcattcgactcgcttgcggaggtagtggtgcagcaaatcttgtccttggagcaacgcgcggctgagccaggcaccaccgagagtgcggcacaagaaagcctcgctcttgccaagctcaagaagcagaagatgggccgtatgtttgatgagtacgaggagagttttgcgtttcgcgcatacgaggttcttctcgagagcagcggagtccaggcggtgctggattttccttacgacaggaacggctacgcgaccaaatttctccggacgaagccagaattggccaaaatctcgtggatcaacgatgtggagagagagaaagacatcgaccacgctgccgagacgctgctagacctgggcctcacccgcgaacagcaggtttggaacaagaagattgagctcagtttgggcaagctggccttgctcgccgaagaagctgaacaagccgtcaacggtgacggactcagcagcgccccctctgagaatgaggggagaaatggcgtaagcctcgagaaggttgagaacgcgctcgaactcatcaagatccaggacgctctctacagtcagatcctgcctacgatccaggagggtgtcgatgagtcggcggaggtggagttggccgtaaaggaacatggaattctgatcccaaagaggcagaaggcgcttcatcatatcttcgatgatgctatggcacgtctcctcaggcacgaggctctgcagccacatacactcatcgatctgctcaccttggcgtcccttccctctagccattacgacactatcggcgaccagttctatcttgcccttaaggttgcccagtacggcctgaagggcgaagagcgcgccgatgccgagcggctgatctggcggcggtgctttgcacgtgatgactggaagcgcgtcaacgagacaaacgagaagggggatctcgatcagctggccactgtgggcgagacggccgcctaccacaccctattcgccgtcgtcgacgagcaacattccaacccggagttccgcccgtttgtcaagccgtctgaagcgctcggcgtctttaccgacaagcttgaccgccgcttcgacgccatggatgacggtttccgtgccaagctgctcgatgccatgcgctgggaggacaagcagctgcgcacggccattgagaagtcgcagcttgacgcgtggtacaggacgacaagggagtgcgccgagaagacggttgccgtcacctatgacaggctgacagctgctaaggcagccgccgtttctgccgagaggcgagcgcaggctctggatgcaccggtgcaggctaacgggagcgcgaaggggcacttgttcattggggaacggacggacggcgtgtcaatgcccggtgggttgtttgggttctaa

SEQ ID NO: 4251 - protein, 1409 aa, Myceliophthora thermophilia
MFSSALQEGGPAKGTRSSRRRQRTSEPSSQQQPKAKRQRVPPAETSSANPDPQPDMYEVKPDKIDLHATKRDGVETVAPPRKELSVRSKKPKPGERSTKGDGSIVLTTNNAFTVSKLPALPDRLRADAQSKDKAFLMPKGGLLCRQDLLNSFKDRQHGVVDSTTGYALSLTHTHAFVWPYTSTTSSPETFIFTLPYPSKHASDPLPLGSLVTPSTSSDEPGLVIVMPMSGKVAYWESISSAATLDFIRQQRSGVEDSISGMYSGEHVTQIVNAGSAGFVLVFSSGRLAYLSVRDAHGRPGITVQFLRSGLGGSALGFFGTIRHALSSAAFRGQIAAARTSPGSKVGERVVVAATSKGRLHSWKIHRGGHHELLSDSDIRDRLVEAIHEADPSVSNFPQDSFEVLDFTLVPRGLEQKYVNASRLSEALTHEEESLQHALLLASFSRQHRSRYSLVEVILTPQGPRIGMVRPVVSYTSSVRSGAPERPRIYLPRPGLIAFLVFDRAVVVASMIAPPDSPDAQLQEDNHILPHSFEDVVDFRDEEKLQVVGSGVEEPSGNGHPQDDLRPHRHRTKNPTVVLLLQGVGTVRIAVSDIDRFASDTPPEVTAKSKLEQAVFFGVKDDNPLVFQGRRDLPFSSQEIGNAAIELSHEIVGSKTPFIANLPASLENNMKSRVVYLDGLIAYLNSLKIDLDIRTRWMLLYNAEKMAVATWIWQKHEQFLAERPKGEKKTLISETAVYINEQQKTELNPAVGQVDPVRHWFINDVWRLDIFVAWAYQIIKYHFTERLADEAGINRLVWEAVTVNNGALFEARQFRLNRARQYGVDPSDIAGGNAIPEPWTATYFITNNLKRLVEFCYQWLDRYSTQTPDDAPIDTRLLDSIRHLLPSLTSQYLTSLAEFSSWAALSDDAQAQERGKTYQQIFQEDVYTKILRLKDFNLWEEAIDLAKEYKAFDSLAEVVVQQILSLEQRAAEPGTTESAAQESLALAKLKKQKMGRMFDEYEESFAFRAYEVLLESSGVQAVLDFPYDRNGYATKFLRTKPELAKISWINDVEREKDIDHAAETLLDLGLTREQQVWNKKIELSLGKLALLAEEAEQAVNGDGLSSAPSENEGRNGVSLEKVENALELIKIQDALYSQILPTIQEGVDESAEVELAVKEHGILIPKRQKALHHIFDDAMARLLRHEALQPHTLIDLLTLASLPSSHYDTIGDQFYLALKVAQYGLKGEERADAERLIWRRCFARDDWKRVNETNEKGDLDQLATVGETAAYHTLFAVVDEQHSNPEFRPFVKPSEALGVFTDKLDRRFDAMDDGFRAKLLDAMRWEDKQLRTAIEKSQLDAWYRTTRECAEKTVAVTYDRLTAAKAAAVSAERRAQALDAPVQANGSAKGHLFIGERTDGVSMPGGLFGF

SEQ ID NO: 4252 - DNA, 624 bp, Myceliophthora thermophilia
atggcccgggccctctacttctacatcgatgtgacgaaacccaagtgcttcttcgaggagctccccaaggacaccctggtggtgggtcactatacggccgaggaatggaacgaccagaggcgcgcctgggagaagcacgacggcatcagcatttacatctctgttgacgaaatatttgacaacgaccatcgcgtcgtctctcagcgcggtggcccctcgggcaaattcactttcacggcggccgaggcgggcgaccacaagatttgcttcaccccttcgtccaacagcggccggtccaactggctgtcggcggcctcccccaatggcggcatccgcctgacgttggacatggccatcggcgagacgagcgctctcgacggcggcaacaaggagaagattcaggatctcgcgacgcgcgtcaaggatctgaacgcccggctgaacgatatcaggagggagcaggtcttccaacgggaacgcgaggccgagtttcgcgatcagtccgaaagcaccaacgcccgtgtggtccgctggattctgattcagctcaccgtcctcggcgtgacatgcgcctggcagctgtcccacctgcggtctttcttcattaagcagaagctcacatag

SEQ ID NO: 4253 - protein, 207 aa, Myceliophthora thermophilia
MARALYFYIDVTKPKCFFEELPKDTLVVGHYTAEEWNDQRRAWEKHDGISIYISVDEIFDNDHRVVSQRGGPSGKFTFTAAEAGDHKICFTPSSNSGRSNWLSAASPNGGIRLTLDMAIGETSALDGGNKEKIQDLATRVKDLNARLNDIRREQVFQREREAEFRDQSESTNARVVRWILIQLTVLGVTCAWQLSHLRSFFIKQKLT

SEQ ID NO: 4254 - DNA, 246 bp, Myceliophthora thermophilia
atgacggcctggtccggcttctcgaacaaagaagtggaacacaaaaagaaccgaaacggaaacgcaggcacggcatcgacgaccggattgtcccacggggacctcggccagtcaagcgttgccctggccgtcagctccctggcgacggggattcagcacatctcacgttataggcgacctcatcccccttccgtcttgtgcggtcgttgctccgtgccgagtacccaggcgtgccggggcctttag

SEQ ID NO: 4255 - protein, 81 aa, Myceliophthora thermophilia
MTAWSGFSNKEVEHKKNRNGNAGTASTTGLSHGDLGQSSVALAVSSLATGIQHISRYRRPHPPSVLCGRCSVPSTQACRGL

SEQ ID NO: 4256 - DNA, 555 bp, Myceliophthora thermophilia
atgggtatcgatctgaagaggcaccacgagcggtccacgcaccgcaaggctcccaagagcgacaacgtctacctgaagctcttggtgaagctctaccgcttcctggcccgccgcactgatgcgcccttcaacaaggtggtcctgcgccgcctgttcatgagccgcatcaaccgcccgcccatctcgctgtcccgcatcgcgaggaacctcaagaacggcaacgagaacaagacggttgttgtcgtcggcaccgtcaccgatgacaaccgcctcctgaccgtccccaagatgacggttgccgctctccgcgtcaccgccaccgcccgtgcccgcatcaccgcggccggcggccaggtccttaccctcgaccagctggcgctcgagaagcccactggcgccaacaccctcctgctccgcggccccaagaacgcccgcgaggctgtcaagcacttcggcttcggtccccacaagcacaagaagccgtatgtccgctccaagggccgcaagttcgagcgtgctcgtggtcgcagaaggtcgcgtggcttcaaggtctaa

SEQ ID NO: 4257 - protein, 184 aa, Myceliophthora thermophilia
MGIDLKRHHERSTHRKAPKSDNVYLKLLVKLYRFLARRTDAPFNKVVLRRLFMSRINRPPISLSRIARNLKNGNENKTVVVVGTVTDDNRLLTVPKMTVAALRVTATARARITAAGGQVLTLDQLALEKPTGANTLLLRGPKNAREAVKHFGFGPHKHKKPYVRSKGRKFERARGRRRSRGFKV

SEQ ID NO: 4258 - DNA, 2064 bp, Myceliophthora thermophilia
atgcatgacttagatgtcaagtatcagcagacgatccacgaatgcgatcttgtggtcaaggatgaagaagcacgccggttaaagctgcgcagcttgatgctccgcgacgaggcatcggagctcagggatcgcctggcacaaaaagatgctcgcatcaaagatctcgttgaacaaatcgacgactcgcgcaggcaattggatgcttcgcaagagaaatcccgcaggcaggataagatcatgcagtcgcaggctcgcgagatcaacaacctgaaggaggaactatccgcatttaacgaagtgtcacagaactcggccaagattctgtcagaaaaactcgccctttcccgcgaagtcgcggtgctcaagcccgagctggaacatttacggtcacagctcgctcaccagaaagatgttctcgccgagaaattggcgcttgagcgccagctgaatacgctagaggttgagctcgccaacgagaagcgggctgctcaaaaagcagcgcaaaaacggaatgacgacaaccaagcggagcaggaccttcgcaaacgggtgcgagagttggaaaaggaacttgcaaacgagaagcaagcgtccgaaacgagcattaggagccatgagagcaagatgagcgaagccgagcgcgagctaaaatcgctgcgagagcagttgacgagcgcagaggcgaatctggctgccgagaagcgcaaggtcggacagctgaccaaatcccaggcgaactccgcctcgggggtacaagaggaactggagcagctccgacagaggttggaggagactcaaaaagcccttgctgctgagaagcgcgcagcgcagctgcacgcgaagagggaagcaccacctaatgacgaggatgcggcacgtctacgggaagagcttgagcaagctcgcaaagagttagcggaacaaaggaagacacaggagaagctccggaaggagattgaacaggcccaggccgacgcagaggagcggcagcaagcagccttcgataaggtcgacaggatgcgcaacaaactacgcgacgcacgggaggaactcaagaagtgccaagccgagctggaaaaggcgcaggagcgggcggcgaagcacagcagtgcgaccaccaccacgacggtaccgctcaagagcgccggagtaaaggcgaacgcaaagaagaagaggtctgcggacgagatgagcgtggatgacaaggtgctcctcacgccgagcaacatggacgatcggccgaagcgccctcttaagaagagaggcttcgacgtgtccaaggtcggcggcaagtccgaattctccatcaccccttttctgaacaagacggtcaacgtcgaaggatccccgaagctcgggggtgatgacgccacgccgagcgcgccagttcagttccgtggtgcggagcaagccaccgcaactgaggccacggagggagctcccgaggagaccacgacagaaaaatccgcagctcccgagcctgcgagcacgaaaccggttgagaaacggccgcgcggccgacctcgaacaaagcccctcacggactcgtccccatccaaacagaacttgaccgctcccacccgcaaggctccgcgtgccgagtccaccctagcgaaggtggcagaagagccagatgaggcggacagcagcacgaaccaggaccaagaaaaccgctcctcgggtagcgccgattccgagccaacaaccaagactgccaccgctgatgccgttaatggtgtcacgaatggtaccgccaccagcagcgcacccgagaagactgaacccaagaagaagaaacgcaagctgctggggacaaacacgtcgacgctgtttgacggcggtgaggacgagggggagagggtcaagcctatcgcagctgttgccacggcggctgcagctggaagaaggccgatcgccggtaaagccggcggaatgaacgctattggcaaaggtcccatcgcagcagccaggtttggggcgggcattaagaatgcattcggcgggactacgttttcgcccttgaagagggagaggagaggagtagcggctagctttttggcgtag

SEQ ID NO: 4259 - protein, 687 aa, Myceliophthora thermophilia
MHDLDVKYQQTIHECDLVVKDEEARRLKLRSLMLRDEASELRDRLAQKDARIKDLVEQIDDSRRQLDASQEKSRRQDKIMQSQAREINNLKEELSAFNEVSQNSAKILSEKLALSREVAVLKPELEHLRSQLAHQKDVLAEKLALERQLNTLEVELANEKRAAQKAAQKRNDDNQAEQDLRKRVRELEKELANEKQASETSIRSHESKMSEAERELKSLREQLTSAEANLAAEKRKVGQLTKSQANSASGVQEELEQLRQRLEETQKALAAEKRAAQLHAKREAPPNDEDAARLREELEQARKELAEQRKTQEKLRKEIEQAQADAEERQQAAFDKVDRMRNKLRDAREELKKCQAELEKAQERAAKHSSATTTTTVPLKSAGVKANAKKKRSADEMSVDDKVLLTPSNMDDRPKRPLKKRGFDVSKVGGKSEFSITPFLNKTVNVEGSPKLGGDDATPSAPVQFRGAEQATATEATEGAPEETTTEKSAAPEPASTKPVEKRPRGRPRTKPLTDSSPSKQNLTAPTRKAPRAESTLAKVAEEPDEADSSTNQDQENRSSGSADSEPTTKTATADAVNGVTNGTATSSAPEKTEPKKKKRKLLGTNTSTLFDGGEDEGERVKPIAAVATAAAAGRRPIAGKAGGMNAIGKGPIAAARFGAGIKNAFGGTTFSPLKRERRGVAASFLA

SEQ ID NO: 4260 - DNA, 648 bp, Myceliophthora thermophilia
atgtccaccagacgagttgacgactttgtcggcaatgacctttcctatcttggctacctttaccttcaggtcaccaacgtcccggtagccgagttgatatctcagcttgaagggcaaattgcaacatcacgccgcgtccaacttcaagcccccagtcaccccggcggtgaatcggaagacgatggaggtcagacacagcaccaacacgagacccgagatggcaactcgcgtagctcgcagcccgtcgggcctgaggacttaccgtctctacatatcgagatctggaatccaagtcccgagtacaagccagcgcaacgcagacccgcgcgatcgagcccagcgtctgaatcttgggagcgccgaaccgcgacatttctttccaacctgcctgtggacgaggagcagtggcgccaggcgaggaagattatatcgagtaacgaacagattttgattattccagcatctaaaagtttttgcgcacttttaccgtaccgaaacgtgattaaccactttcctgccatagggaaagagcgctgcgttatatttttggctttcgctcagttgcacacagtcatccctcgatcgatccttccccgtggtcaaaatagagtcgaaccccgcgactgtcaaaatccttcttccctctga

SEQ ID NO: 4261 - protein, 215 aa, Myceliophthora thermophilia
MSTRRVDDFVGNDLSYLGYLYLQVTNVPVAELISQLEGQIATSRRVQLQAPSHPGGESEDDGGQTQHQHETRDGNSRSSQPVGPEDLPSLHIEIWNPSPEYKPAQRRPARSSPASESWERRTATFLSNLPVDEEQWRQARKIISSNEQILIIPASKSFCALLPYRNVINHFPAIGKERCVIFLAFAQLHTVIPRSILPRGQNRVEPRDCQNPSSL

SEQ ID NO: 4262 - DNA, 174 bp, Myceliophthora thermophilia
atgaatggtgtcgtcaacacggagaaggacgagctaggaggggtacagggctcggagcctcccggaccacagccgaatcctgtcaattggaaagccgggaccatcactgcggtccgcgtcatgcttgcgggctggtggatgctgagggcaaagtcaaagcagcctagctcatga

SEQ ID NO: 4263 - protein, 57 aa, Myceliophthora thermophilia
MNGVVNTEKDELGGVQGSEPPGPQPNPVNWKAGTITAVRVMLAGWWMLRAKSKQPSS

SEQ ID NO: 4264 - DNA, 1461 bp, Myceliophthora thermophilia
atggcccgcgtcatgttggggaactcgcccgatgctttcgagggctccttcgtcaagggttacgagaaaggtttcgagagtggctgggctctcggcttcgagcatggcagaaaggaaggtcgccgcgaggtggttgttcaaaagaataaaggtaccgataatccctatgccgagatcgccgaggttcaccgatgctgctgcccctcttcgaccttgagccgccaaaagatgtgtctgctgagtgatgcccccttatacgagggtggtagtggcgatgcccagtccgtcatatccgccgctgattccgagaactcggacctgatggacgtttaccacgatgctcagtcgcatctcgcctcgtcgtctgttccgggcaacagcggggacaacgcgggaacttcggacagacgattcgggcctgatgccaatcacgccgttggtaatcttgagccttcggaccagaattcgctgaaccttcaccctgggaacaacggtgcccgaggcactgtcacgtcctctccgggccctggcaaccaggtcaacaacgtccataccaaccgtatcgtgagtgcggcccattcccagatgcctgccgctgccgacgacgtcacgtctccggagaaggaagagaaagaggaagaggacctgatctggctcggcacggcccccactcctatgatcacgggcgaggctcccaaccgccatgacaacatggaccccgacaccgccctcaccaaccccacggtcaacactccctccgtcaaggagaccagcagcaacgaaggaggaaaggcagagaaaatggaggaagaagaagcagcctgcgcacccgcacccgcgccctcgacgacgacgacgatgcagacgacgacgacgatgcagacgacgacgaaaacgctctacaacatcccgctcccgcccgcggtgcgcccgctgacgccggacctgagcgtgtccccgcgggcgcggcgcgggccccgcccggcctacccggtgctcgagcgcggcttcgacgcgtacgcgctgcgcgcccgcggcgcccgcgtcgtcgagaacccgtggcgcgtgctcgtcggcccgctcagccccgcctctcgcgccgcgtggcgccgcgacgccggcagggcctacctccgcagccggctggagaccccgaccccgcggatcaggggtggtcgtggttttggtggtggttttgctaacttgcgtgttggtggtgctactgctggtggtggtagtagtggcgctggcggctggggcccgaacgacgaggagaggggtgatcgggacggggactccggcctggtcttttgtgacatggtcagcgacggccagggcgtctggtacgtgctggcgacctttgatcggcaggaccgggccagcagggcggtcgaggtcttcacgggctacgcttgcgggggctcgatcatgtgggcctggattttccaggaggaagagtga

SEQ ID NO: 4265 - protein, 486 aa, Myceliophthora thermophilia
MARVMLGNSPDAFEGSFVKGYEKGFESGWALGFEHGRKEGRREVVVQKNKGTDNPYAEIAEVHRCCCPSSTLSRQKMCLLSDAPLYEGGSGDAQSVISAADSENSDLMDVYHDAQSHLASSSVPGNSGDNAGTSDRRFGPDANHAVGNLEPSDQNSLNLHPGNNGARGTVTSSPGPGNQVNNVHTNRIVSAAHSQMPAAADDVTSPEKEEKEEEDLIWLGTAPTPMITGEAPNRHDNMDPDTALTNPTVNTPSVKETSSNEGGKAEKMEEEEAACAPAPAPSTTTTMQTTTTMQTTTKTLYNIPLPPAVRPLTPDLSVSPRARRGPRPAYPVLERGFDAYALRARGARVVENPWRVLVGPLSPASRAAWRRDAGRAYLRSRLETPTPRIRGGRGFGGGFANLRVGGATAGGGSSGAGGWGPNDEERGDRDGDSGLVFCDMVSDGQGVWYVLATFDRQDRASRAVEVFTGYACGGSIMWAWIFQEEE

SEQ ID NO: 4266 - DNA, 5214 bp, Myceliophthora thermophilia
atggataaaccaaagcagaaggaaaaggaaaaggagaaggaaaaggaaacccggagtctgtacgaggaggccctcgagcgcttccgcaaggatgcttccgaacggcactcgagcgccaaggatgcggagctgctgaacgagttcctgcgcgagagagccacgccagaggagacaaagctggccgccgagctgctgcaaggcgatgcggggaagaagtatggaggccgcaaagtgggcgacgtcgagatccctgcctcgtggatcgccaacatcatggagaatatcgagcacttcgtcgccgccggcgactttgtcacaaaaaacgctcccgagagcgtcggcatggcctggtacgccatcaagctcaccctgactgccatccacaccaactacgacctctacaccttcttcggctccggtctgagcgacatcagcgagatcatggtcatcgtgcgtcactacgaccgcctgtacgatgagaggtccaagccgtactggaagccaaatccgtcggtcgagcagctttttcagaacgtcattggtgcctattccgccgtgctggaattttcctatgccgtcaagcgccatctgacggcaggcgccctcggtcgcatcaaacacggcttcaaggatttctttggtctctccaaagcgaagtttgaggacaggctgaacgccgtggccaccttcaaacagaagatcctggaggggagccagggcatcttccaagacaagaccctatcccagctcgagagcgtctcctctgttctggccggcattgagggaaccgtccggcacatctgggactttcaagacacccaaagaaagttgcacgaggaggccatggcgaaattcgatgttctgctcaaaggactagatgatatcaaagcatctacaaaacgcaagtctcggtgggactacgctctgcaggacttccagacataccaggaagccctcagcccgatgcagggttctttcaagatcctcgaagacaccatcgacgccaccttccccgggacctgccagtgggtgtttgaactcgatacctacaaccggtggactgaggcagaaggtagcgcgctgttatgtctggccggtcccgagggatctggcaaatcgtttgtcgtggccaccattgcggaccgcatcacagccgcggccggccccgatgaggctctgctgtacgtttcatgcagcggctcaaccagcagcgccgagctgagaaacaatcaggtgtacactgcagacagcgtctgccgaactctactatcgcagctctatgagttggccgtccagggcgaagacagggttgagctgctcgagaactgcaatgccattttctggaaggcaaaggccaagagtaacgttatgtcggctctgatgcgatccggatccgatagcctgccagagtttgccgatggttttgcccgaattgccgccctgatcaagaagaaggtagtcctcgtcctcgatggcgtggataccaactgcctcgacaacaagaatcaagaagaccttgcacgaaaaatcgacagcgtcatgagcgccatgtctgaaaaggctggcattggcatccgcatcctcatcgggtgtgcttcttcgtcgaagctcttccacgaacttaatcctgattctgacgaattgatcggcgtcgatttctataaccggggcgacatcgagatgatcctgaccgacgcgctcaaggacgtgccagggctctccgccgccgaacaggagacagccaaggaggccatcatgaaaaaggccggctcccgattcctctacgtcagggagaccgccatcccgttcatgcgcgaaccgtttcaacggccgctttccaaacggctggaggctctcccggatggcacaagtgacgtgtacggcgaagcattgagcaaaatgagttcgaactacctggacctccttcgcaccgcactcacctggaccgttttctcttctcccgagttcccgggatggctgcaggcgaaagaggttatggatttcttccagggcacctacgacgatccggaggcgagagacgccgcggacgacggagatgacgaagaagggttcccggagataacaccactcgaactcgaccagcttcgcaccgctgccaatccattcctgaacgtgtggcaggattccgatggagagtattggctcttcgagaccgacgaggcagctgttcatgaatatttcgtcagatccggtgacgatattccagcagaggaggaaagtcacgaacacctctgtgcgcgatgtggttccaccgcctccacgtccaggcggttgtacattgatcccaagcaaagtcatctccagatggccctcacttgcctgcgccacttgaacaacaccctgtttcaacgaagggccggcctaatcagcgccgccgatgaagacacagacgatgaagacggcggcgatgaagacgggggcgacgaaggcgcgggcgaagatgaggcgggcgatgaggacgcgggcggtgaagactctgcccatgaggatagtggggagagcgccgcgccggagagtgacgacgaggacgcatcgaccacggattccgagtccgaggctgagagggagcacgacgaagaggacaacacaaagcgcaggcctacggtggaagagacgatgcaaatggttgaagacggctacaccaccgaagactccctcgacgatgaggatatcgtcgaaaaaaccttcctcgatcgcgggccagacgaggccgaaacatccccggaagcagacaatgatgatggtcccgatcgcatccggtacgaactccagtactggcactggcatctgtcacaggctgagtcattgtggcctgccgaagaacgggaggccaacgccgactgggcagccctgatggctgaactggacaagtttgcttttgagactcccgaggtctttgctgcttggcagagcgagtatccagaggaagaagacgagtacaaagccttccggctagacgctgggccacacaggccgctgcatgttgccgcgtacctcggtctggtcagctggacgaagcacctcctcgatcggggagaggagctcaatgagcagtcgaaggggtacagcccccttcaagccgccgcctgctccaggcgctctattggcaccctgaggctcttgcttgatgcaggcgccgatcccaatgccgagaacgggacggaccgcaacgcgttccatctctgcctgctgctcggcgataaaagcgtggagggagcacggatgttcctggaccacggtgctgatcctctccgtacctgctcgaggatgcattacagtccggtccagtattttgccttcaggggtgaggatcctgaagtccttgacctcctgatggccgccggagcggacgtcaatgcagtctaccctgaggacccctggaagttctcggctctgcacatcctgctcgccaggcgagaggttccgccgacgctcctagaagcctttgttgtaaagcataaggctgatacgaactgggagaacgttttctccgcgaggcccatgcagattctctgcaacaatggccagctcgagcttctccggatcctccttcagtccgagattctcgaaatcgatgacacggaccttcaaggcacaacggccgttcacgaggcctccctttacggctacaacaaatgtgtcgaagctctactcgagcacggcgctgatcccgacattgccgataagctcaagcggaccgcgctgcatactgccgcccgaaaagggcacaccgagactgttcgcgtgctgctcggattcacgaagcagcccaatctactagacaagcagagctggagccctcttttctgtgcctgtctcagcaaggacgaagaatccgccctcttgatcttggatgcgctcactgaacgtgaggtcccattgtccgaaatcaacctctccactcgcagcggccgaaccgtccttcgccaggcggcaaatcacggcttcatcaaggtcgtctccaaactcatccagcttgccactgaccgctccgacaccgccggcctgctcctcgacgcgcgcgacaccaagaagggcatgacggctttacaccgcgccgcgtccaacggccacgcggcctgcgtccgggcgctcctggccgccggcgccgaccctaccctcctcgacaaccagtcgcgcccggccctggcgctcgcctacgaacagtggaccgtcgcgaacaagaacgaggcctacgaagacatcctcgcccagctcatcgccgcggctcccgcggccaccgtcgcggacgcggacctggtcgccgtgtgcgcggccaacggcagcgtgcgcctgctcgagcagctgtggcggctcaacgcggacctgaaccggccggaccggtacggctggacgccgctggcgctggcgcggcagttcgcgcgcgccgaggccgagggcttcctcaagcggcagccggcctggaccaacgtgctgccgaggcgctgggagacgcggttccccggcacgacggcggccggcacggcgagcgtgctcgagggcggcagggagattctgcacacgagcaagaagcgcgtgtgcgtctcgacggaccggccgctgccggacgggctggagtcgtactactttgagatcacgctcaagcaggtgccggacagggaggtcaagacgaagtggcccgaggtggcgatcgggttctgcaccctgggcggggccgccgtctcgttccccgggtggtgggaaggcacggacagcccgacgacggccaagtcgtgggggtatcactcggataccggcaggatgtattcctcgacggtggacccgggcgacgatttcgaggactcgtccatcaagaaacagagatatcgggtcggggacacggtcggcgcgggagtggacctggccaagggggagatctggttcacccggaacggagtcaggctgaaagaagtgctcacgggcgtcgaagggcgcctgttccccgtcgtggggctgcatgaagaggtctacttcgagaccaactttggtagggaaggtgacggggagttcaagtggaagccggatgcggcggcgcagacgggagaagaagaggaggaggaggaggaggagaagaagaagaacgggacggtggtggaagtcgttcaggtcacttcgatcgatggggaccagatggtcggggagaaacaggctgctgctgtgcaggtgacgagcgaggtggccgttgtgggatga

SEQ ID NO: 4267 - protein, 1737 aa, Myceliophthora thermophilia
MDKPKQKEKEKEKEKETRSLYEEALERFRKDASERHSSAKDAELLNEFLRERATPEETKLAAELLQGDAGKKYGGRKVGDVEIPASWIANIMENIEHFVAAGDFVTKNAPESVGMAWYAIKLTLTAIHTNYDLYTFFGSGLSDISEIMVIVRHYDRLYDERSKPYWKPNPSVEQLFQNVIGAYSAVLEFSYAVKRHLTAGALGRIKHGFKDFFGLSKAKFEDRLNAVATFKQKILEGSQGIFQDKTLSQLESVSSVLAGIEGTVRHIWDFQDTQRKLHEEAMAKFDVLLKGLDDIKASTKRKSRWDYALQDFQTYQEALSPMQGSFKILEDTIDATFPGTCQWVFELDTYNRWTEAEGSALLCLAGPEGSGKSFVVATIADRITAAAGPDEALLYVSCSGSTSSAELRNNQVYTADSVCRTLLSQLYELAVQGEDRVELLENCNAIFWKAKAKSNVMSALMRSGSDSLPEFADGFARIAALIKKKVVLVLDGVDTNCLDNKNQEDLARKIDSVMSAMSEKAGIGIRILIGCASSSKLFHELNPDSDELIGVDFYNRGDIEMILTDALKDVPGLSAAEQETAKEAIMKKAGSRFLYVRETAIPFMREPFQRPLSKRLEALPDGTSDVYGEALSKMSSNYLDLLRTALTWTVFSSPEFPGWLQAKEVMDFFQGTYDDPEARDAADDGDDEEGFPEITPLELDQLRTAANPFLNVWQDSDGEYWLFETDEAAVHEYFVRSGDDIPAEEESHEHLCARCGSTASTSRRLYIDPKQSHLQMALTCLRHLNNTLFQRRAGLISAADEDTDDEDGGDEDGGDEGAGEDEAGDEDAGGEDSAHEDSGESAAPESDDEDASTTDSESEAEREHDEEDNTKRRPTVEETMQMVEDGYTTEDSLDDEDIVEKTFLDRGPDEAETSPEADNDDGPDRIRYELQYWHWHLSQAESLWPAEEREANADWAALMAELDKFAFETPEVFAAWQSEYPEEEDEYKAFRLDAGPHRPLHVAAYLGLVSWTKHLLDRGEELNEQSKGYSPLQAAACSRRSIGTLRLLLDAGADPNAENGTDRNAFHLCLLLGDKSVEGARMFLDHGADPLRTCSRMHYSPVQYFAFRGEDPEVLDLLMAAGADVNAVYPEDPWKFSALHILLARREVPPTLLEAFVVKHKADTNWENVFSARPMQILCNNGQLELLRILLQSEILEIDDTDLQGTTAVHEASLYGYNKCVEALLEHGADPDIADKLKRTALHTAARKGHTETVRVLLGFTKQPNLLDKQSWSPLFCACLSKDEESALLILDALTEREVPLSEINLSTRSGRTVLRQAANHGFIKVVSKLIQLATDRSDTAGLLLDARDTKKGMTALHRAASNGHAACVRALLAAGADPTLLDNQSRPALALAYEQWTVANKNEAYEDILAQLIAAAPAATVADADLVAVCAANGSVRLLEQLWRLNADLNRPDRYGWTPLALARQFARAEAEGFLKRQPAWTNVLPRRWETRFPGTTAAGTASVLEGGREILHTSKKRVCVSTDRPLPDGLESYYFEITLKQVPDREVKTKWPEVAIGFCTLGGAAVSFPGWWEGTDSPTTAKSWGYHSDTGRMYSSTVDPGDDFEDSSIKKQRYRVGDTVGAGVDLAKGEIWFTRNGVRLKEVLTGVEGRLFPVVGLHEEVYFETNFGREGDGEFKWKPDAAAQTGEEEEEEEEEKKKNGTVVEVVQVTSIDGDQMVGEKQAAAVQVTSEVAVVG

SEQ ID NO: 4268 - DNA, 1392 bp, Myceliophthora thermophilia
atggacgattggatccagcgggaaaggccggggcccgacccattatgcctggctcccgcccaagcgcacgacatcacatacagcaagggcttgggcaacagggctcatcagctgatggagagcaccagcacgaacacgagtataagctggggccgtcgcgcagccgccgcggccttggatctcggacggtggcggtcccataaggcgcgcaaggcgagctcgtcgtcagtgtcatggccagcgtcgtccgtgccgaagaaggctcccggcaccttgatgaacaggagccgcgagagtgacatttttggcggccgtgtccccggccattccgaggtgcgggcggagagagtgagagtggcaacgacggggcctgatctaaatgcggcgacagtgggggcggtgacagactgcggatggtccggaacatcctcgtcatcgatcacgggcaacgagatccggtacaacgacccggactgcagaccgggaatgcgatgtaccaggatcgaggcctgtgacgacccgggcaccgccccgaccctcagcgcggacaagaagcactttgcttgctgcctggagggacagcagctcctcggcagccccgacacggcgtttgactgctgcgccggcggccacgacttggtgggctccgccgcgacgggctaccgctgctgcccgatcggctacacgtacgacggacagctgtgcagggagctgtgcaagaacggaaagcagctggtcgacgggaaatgtgtctgccccgaggggaccgtcgaggcggcggacgggacctgcaggcaggccaggccgccgaagccggattgttcgtctggattggagacgggaaaatgccacaccttcacgagcgagaatggcgaccgcctcggcctgcacaacgacggggtgtactacgccaccaaggacagcatagcccatcggtacggcaagttccagctctgcaaggacgagaagtgcacgcccggcctggccatcaacccgtccgacaagacgtacatccgggacatctacggcgacgtcacgacgggcgccaacgccggcatgtggctcaacaacgccaagaacggccggcacatcgggcgcaccaaggccttcgaccaggcgggcgagttcgcgctgagcaagtggccctgcggcaagtactgcctcggcggcttccggcacggcctcggcccggcctgtcccgcccagaccccggccctgaccttctacacgcaggatccccagatgtgcgtccccttcgagctgaccgaggtcccctgcgacatcaagtccgacgccaacaactgcatctggacgaacggagaccagtgctgcgacaaggtcgattgctcttggaggaggcgcggcggcgactcgggccacaagtgccattaa

SEQ ID NO: 4269 - protein, 463 aa, Myceliophthora thermophilia
MDDWIQRERPGPDPLCLAPAQAHDITYSKGLGNRAHQLMESTSTNTSISWGRRAAAAALDLGRWRSHKARKASSSSVSWPASSVPKKAPGTLMNRSRESDIFGGRVPGHSEVRAERVRVATTGPDLNAATVGAVTDCGWSGTSSSSITGNEIRYNDPDCRPGMRCTRIEACDDPGTAPTLSADKKHFACCLEGQQLLGSPDTAFDCCAGGHDLVGSAATGYRCCPIGYTYDGQLCRELCKNGKQLVDGKCVCPEGTVEAADGTCRQARPPKPDCSSGLETGKCHTFTSENGDRLGLHNDGVYYATKDSIAHRYGKFQLCKDEKCTPGLAINPSDKTYIRDIYGDVTTGANAGMWLNNAKNGRHIGRTKAFDQAGEFALSKWPCGKYCLGGFRHGLGPACPAQTPALTFYTQDPQMCVPFELTEVPCDIKSDANNCIWTNGDQCCDKVDCSWRRRGGDSGHKCH

SEQ ID NO: 4270 - DNA, 786 bp, Myceliophthora thermophilia
atggcccgcaacctctcccagtgccgtacccttgtaaaaaaagcagctcaggctggtgcaaaggccctcttcctgcccgaagcgagcgactacattgctagctccccagccgagaccgtcgccctcgtccggccggtagacaagagcgagtttgtcttgggcctgcaggaagaagcccgccgagagaagctgcccattcacgttggagtccacgagccggggctcgattccaacaaggtgaaaaataccgtcctttggattaatgagcgcggtgaaattgcccatcggtaccaaaagattcacatgttcgatgtcgacatcaaggacgggcctgtgttgaaagagagcaactcagtggaaccgggaaatgagattcttcccccttttgacacgaccctcgggaaggttgggtcgacgatatgttttgatctgcgatttcccgaaatcagcatagccctaaaacgccttggggccgacatcattacctacccatccgcctttaccgttcccacaggcagagcccactgggaggtcttgctgaggactcgagctatcgagactcagtgttacgtcgttgctgctgctcaggtggggaggcacaatgagaagcgggtcagctacggtcacagcatgatcgtcgacccgtggggtgtcgtcttggccgagcttggggataccagtgaggagcctgagatcgctaccgcggatatcgaccatgacctgttgcgaaaagtcaggatggaggtcccgctccgcagaagaacggatgtgtaccctgaaatctaa

SEQ ID NO: 4271 - protein, 261 aa, Myceliophthora thermophilia
MARNLSQCRTLVKKAAQAGAKALFLPEASDYIASSPAETVALVRPVDKSEFVLGLQEEARREKLPIHVGVHEPGLDSNKVKNTVLWINERGEIAHRYQKIHMFDVDIKDGPVLKESNSVEPGNEILPPFDTTLGKVGSTICFDLRFPEISIALKRLGADIITYPSAFTVPTGRAHWEVLLRTRAIETQCYVVAAAQVGRHNEKRVSYGHSMIVDPWGVVLAELGDTSEEPEIATADIDHDLLRKVRMEVPLRRRTDVYPEI

SEQ ID NO: 4272 - DNA, 405 bp, Myceliophthora thermophilia
atggctactaacgaactcgagaaccacgaaaagtactcgcagaagttggtcaacgaggcctacgccaaaatcgaggcactcgaaggcgctaaagcaaagcgtatcaagatcgaactacctagcaaatacagaggaaccaaggaggatcttgcaagattcctaacaaacctccgatcctacttctggcttaatgataacaagtttccggacaacaaagccaaagtcctctatatagccacgagactagagggcaagaggaagacaaagacgatcgagacgcgtttacataggcagtcttccgatcttatgaccgttttgaagaagagcttcggaaggtttttagcgacaaagacgagaagatttatatacaagaaagactcgccaatctctgatagactaagttag

SEQ ID NO: 4273 - protein, 134 aa, Myceliophthora thermophilia
MATNELENHEKYSQKLVNEAYAKIEALEGAKAKRIKIELPSKYRGTKEDLARFLTNLRSYFWLNDNKFPDNKAKVLYIATRLEGKRKTKTIETRLHRQSSDLMTVLKKSFGRFLATKTRRFIYKKDSPISDRLS

SEQ ID NO: 4274 - DNA, 222 bp, Myceliophthora thermophilia
atgaatagaactacggttaaggctaacgataagaaaaagcgagtaaaggaaattacgactatcgacgaaaccactaaggacatcatcaaagtagcagctacaagctacgaagataagggtagtaacacagatagtctcggatacgatggtaacagtaaagacgaacaagcactgtactccgaactggtcactatagatctagagataggtcttgccaaatag

SEQ ID NO: 4275 - protein, 73 aa, Myceliophthora thermophilia
MNRTTVKANDKKKRVKEITTIDETTKDIIKVAATSYEDKGSNTDSLGYDGNSKDEQALYSELVTIDLEIGLAK

SEQ ID NO: 4276 - DNA, 8022 bp, Myceliophthora thermophilia
atgactgaagtagctgccaacgacaccccgggcagcttcgatctcgagcaggccaaggcggcgctgacctcgtcgtcgacaactgcccgcatcgcccaattgcgggggattgacgagagtatctcgcacaaggccctcgacaggaccgcgacgctcggcatcctcaaagtccttttctggacacatgccatctacatcgaccgaccctccagacaagcagtccaacgatgcctcgcttcgctctgccgagtaggggatgctgacgtcctcgcgcccttgatcgccgcggtccgccaggaaacccagaaacatggcattgcgcccgatagtgcgttcgtccttgtggaatggtccagcttgttgacccagcacttcgcggggacgccgctatgggacaagtttggcaaggacatcattctggctacggcggacggcctggaaaagtgcctgcagcctacagcaaagggtacgattggcagctccgcgctggtcatcacaaggagagccctccgaaagctggccgcggcagatcaaaaggcaatcgacgcagctgttcagctcctcacggctaagggaagccagcctgctgccaaatatgccgtcttgctgggcgccatagcgggcgtctgctcgcgcaaaccggaggcgaagcccgtcgtcgaggggttgaagaatcagtacctcgcattctacgtccgcgaaatcgtcgggtctcgaacaccagttccagctcaccaagcaaacggacttggggatttcttctcggccttcgtttccctcgaggatctcgagaaggaggtttttccggctctggaaaaaggcctgctaagagctcccgaggtagtcctcaacgacctgattacacctcttgttcgctccctgccgcagttcgacctctccaagaccctgtctggccgctttgtgaagccattgctctccaatatcaagtcatccaacgctactattcgcagcggcgctgtcacagctttccgcgtcatagcctccagcagccaagacttcacgcttctcgagcaagccgctgacgaggtgctcgggcccctgaagtccggcaaacttgcgtctgcagatcacagggtcctgcattccgagatgttagttgctctgcctttgtcgacaagcatcgcaaccaaaattgcctctgggctccccgccctcgtgggcaaggaggccaacgaggcggccctcagcgccgaaacgctggctttgaatgcgagcgccacggctcttcttcgggacggcgaggccccaaagacactgcttgacgcgtacgcaaagggattagcggacaagaaggctccgatccggcggatttggatcctacgcactggagatctgctgcagaccttcgccgagaaacccaaagctgacctccccaagagcgtcgtcacgtttgcggaagccgttcttcctcctctcctgtccactttcaacgaagtggtcgcgaatccaatcgctgccgctcagagtggccttgtctcggcggccctggttgtctgtgctcttgaatcgctgctcagcaggctcgaaagcgccaacgtacagtcgctgctccaaaaaccgtcgatacaaaagaacagtttggcagtagagccaaagccatcatacctgttaaatcaacggatatacagcaagttttccggagacgattcaaagtggctctgccgcgcactttccgagattgttcccgccctcagctcaagccccgaggcggtcaggatcgcttgggctcaagcatatatctacctaatctgctcaactggttcgtcccctgacgtgcgccgccaaacgatcaatgctctatccggtctctgtgcccaaaaggcggctgccgatggcgcatctgttgcctcggagatcattaatggcttatggcactggatcgaagcgttggaggcggccgagaaagaaagcgcggcagtattagccaagtctgggaactctaacctccatttggtgctcaagtcgatttgccctccaaaaggatccgcaagccgagacggctctgatgccgacagcacccaaaaagaatcccaaatgtgttccctgcttgtgcttgccaggccccagctcatccctcgtgcgagttggatcgacctttgcttgagggtagggctggatcctggcgagttggctaagaaacacgaggaaaccttgattcaggaaatcgttggacgcaccagctatggccaaaagtccgaggccgtcaagaatgcggcttacagtgcagctgccgagctcgtattcgtcgcgccggaatccatgacccagagaattgtcgaccttattcgtaacgacttagacacgtcccagctgcagacagtcgggcctctcgaagctgccatcttccgcacccctgaaggaactgcattcgtggatgtcctcgccaagaagcagaatgtcgttccgaataagaacgtcaaggactatgatttgctgaagtgggaggaggaactcagagctcagttggccgagaaaaaggggatccagaagaaactcactgcggacgagactgcaaaggtcaatgcgcagctcaaaaaggaagccgagatacgcgatcaggtccggcaaatagcttccaggttgctgcgtgggtttgggattgtcaaggcgctcgcgactgggccgccgtcggatgtccgccgttggattggtgctgctatcagtgctactctgacgtccatcaaagccggcgccaccctgatcaccgcagaaaccgggccgatggcgtttgtctcgtgcgcggagcaagtttcgtctcgtcttggaactattcgcccgttcattggagccgccaccctgcgcgctcacgacgtctcggccctgccggaggaactgacccaagaaccgttcgaggatctggtcacgagagtgctcttccgtttgcgctttgccagtgagcagcggccgttcgatgtggttactctcgtctacatcctcccccttcttcttttggtcctcgaaaagggagggttcggtggcaatgcagatgatcgtgacgcccagttggtccttgccatcgagactctctcgttccatacagatgttacagcagacgaggcgattccacgagccgagattctcgatggcctcatcttggcgatgcaaaggtacagccaacactacaagattctcaaggactgcttctccgacatggtgcgctgtgtcgctcccaacataagctctgaagagattggagtcctttcccgtggcagcatcgtcccccaggccagcgtgcggacggcagtgctgcaagccatcagtgctgaggtcgacatgagcgaagtcggcgtgtcagaagagatgtggattgcctgccacgacgacatcgaggagaacgtcgaacttggtcgcgagatctgggaagagagcgagttccaggtgtccgaggaacttgcccacaagatgcttccctacctagagagcaaggacgcccagcttcgccgtgccgccgccaaatctctggctgaggcggccagccagaacccgaccgtcatcccgcccattcttgagaagctccagtcatcctatgtcgaactggccaagccacgcgttcaggagctggacgagtttgggatgcccaagaaaatggacctatctgatccctgggaagcccgccatggcatcgctctcgcctttaggcacctcgctcccgacctgggaaaggcacagctcgaacccttcttcaacttcctcatcgagcaaggcccacttgcagaccgcaatgccactgtccgttccacgatgctcgatgccgcaaacaccgccattgagattcatggcaagggcgtcctcgacaggttgatgaagacattcgagaagactcttgaggcaccagacaagaattccgaggccgcggaccgcgtcaacgaggcagtcatcatcatgtatggtgctcttgctcggcatctgaaacctggggataagaaaatccctgtcgtgatcgaacggctccttgcgacgctcagcacgccgtccgaggcagtgcagtatgccattgcagaatgccttccgcctctcgtccggacctgcggcgacaaatcatcgaagtacattgaccaagttctcgagacgctgctgacatccaaaaattatcctgagcagcgcggagctgcctacggtctggcgggcctcgtcctcggcaggggcatcaacgtcctgagggagtaccgcatcatgattacgctcagcagcgctctcgagaacaaaaaggagattcgccagcgggagtccgccatgctagcttacgagcttctctcgaccattcttggccgcctcttcgagccatatgtgatacaaatcgtaccgcagctgctcgcagggttcggcgacggcaacgctgacgtccgtgatgctgcgctggcagccgccaaggcgtgtttctcttcgctgagttcgtatggtgtcaagcagatcctcccaacccttctcgacgggcttgaggaagaccaatggcgcagcaagaaaggtgcatgcgacacccttggtgccatggcttaccttgacccccagcaacttgcgcagagtttgccggagatcattccgccgctgacggccgtcttgaacgacagccacaaggaagtccgcgctgccgccaacaagagtttgaagagattcggcgaagtcatcaccaacccggaaatcaagggcctagtcgacatcctccttaaggccctcagtgacccgaccaagtacactgacgaagccctggacgcgctcatcaaagttcaattcgttcactatcttgatgcgccgtctctggcactcatcagccgcatcctccagcgtggtctgtccgaccggtccaacaccaagcgcaaggcgtcgcaggtcatcggcagcttggctcatctcacagagcgcaaggatctggtggcgcatttgccggtcctcgtggcaggcctgaaggttgccgtcgtcgacccggtgccaaccactcgcgcgaccgcatcccgtgcacttggatcgcttgtggagaagttgggcgaagatgcactgccggatctcatcccgggcctcatgcacactctcaagtccgagacgggtgccggcgacaggcttggttctgctcaggcactcagcgaggtcctcgctggcctgggaactgcgaggttggaggagacgctgccgaccatcctgcaaaatgtcgagtcgcccaagccctctgttcgcgagggcttcatgtcgctcttcatcttcttgcctgtctgtttcggcaacagcttcgccaactatctcggtaggatcatcccgccgatcttgtcaggtcttgcggacgatgtcgaggctatccgcgacacagccctccgtgctggccggctgctggtcaagaacttcgcggtgcgcgcggttgacttgcttctgccggagctcgaacgcggcatggctgacgacaactaccgtattcgcctcagctccgtggaactggtgggcgacctgctcttcaacctcgcgggcgttaagtccaagaccgaggaagaggaacaggatcaggacgtcaccaaagaagctggggcttctcttcgcgaagtcctgggagaagagaagcggaacaaggttctctcggcactgtacgtctgccgctgcgatactgctgttgctgtccgcgcagccgctatcggtatctggaagtccctggttcacagcccgcggacgctcaaggagctggtccctagcctcacccagctcatcatccggcggctgggcagctccaacatggagcacaaggtcattgctagcaacgccctgggcgaactgatccggaaggcgggcgacggagtgctggcaacgctacttcctacgcttgaggaaggactgcaaacctcgcgcgatgtggatgccaagcaaggtatctgcttggctctcaaggagctcatctcgtccgcctcgccagaggcgctcgaagaccacgaaaagaccctcatctcggttgtacgcacggctctcaccgactcggataccgatgtccgggaggccgctgccgaagccttcgactcgctgcagcaaattgtcggcaagcgcgccgtcgaccaggttctgccctatctcctcaacctcctccgctcagaagcagacgcgaacaatgcacttgctgcccttctcaccctgcttaccgagtctacgcgctccaatatcatcctgccgaatctcatccctacccttatcacgcctcccatctcggcgttcaacgccaaggcgttggcctccctgtctaaggtcgccggtgctgctatgaaccgccggctgcccaacatcatcaactcgctcatggacaacattgtcaactgcaccgaagatgagctgcgggaagacctcgacgcctcattcgacacggttatcctgtccattgatgagtacgatggcctcaatgtggtcatgaacgtccttctacagctcatcaagcacgatgaccaccgcaagagagccgccactgcccggcacctcggcaaattcttcgcagaggccggtgtggattactctagatataaccaggacattatccgcgccttgttgatctcgttcgatgatcgggatatggaggttgtcaaggcggcttggggcgcactgaacgaattcaccaagcgcctcaagaaggaggagatggaggcactcgtgcagtcaacgaggcagacccttttgcaggttggcgtcgcaggccacaatctcccgggtttcgagctacccaagggcatcaacgctatcttgccaatcttcctgcagggtcttatgaatggcacggcggagcagagagtctcggccgctctggctatctcggacattgtcgacaggaccagcgaggagtcgctcaagccattcgtcacgcagattactggtccgctaattcgcgtggtttcggagcggtctaccgaggtcaagtcagccattctcctcacgctcaaccacctgcttgagaagatgccaacggcactcaagcctttcctgccgcaattgcagcgcacatttgccaagtcgcttgctgatccctcgagcgacgtcctgcggagtcgcgctgcacgggcactgggcacgctcatcaagttcactccccgcgtcgaccctctgattgccgagctcgtgactggatcaaagactacggatgccggcgtcaggacggccatgctcaaggcgctgtacgaggtgatcagcaaggcgggagccaatatgggcgagagctcgcgcacggctgtactaggcctgatcgacaccgagaccgacgagcgcgacgttgccatgacaatcacctacgccaagctgttcggcgctttggtcaagaacgtgtccgctgatgttgccaccggactgctgaagaacagggtcatgacgcgcgattttagcaacgccagtgttttggcgctgaacgctgtgctccttgagagcccggatacgctacttaactctcctctggcggacgacttgccagaattgctctgccagggaatgcagcataaagacccctacatcgtcgacagtttcatcacggcgacgggcaagtacctcctcagcgacgcccccaaggctttcgaaactaccaagcccatctttgcaaccctcgcaaagatcatcccgcccggcaaccccggcgactcgcggcgcctggcgctcgtcctcgtgcgcacgctcgcacgcaacaacacggatatggtgcgcccacacctcgggttgctcgccccgcccgtcttcgcttcggtgcgtgacatggtcattcccgtcaagctggcggcggaggcggcgtttgtgcagttatttgccgtcgccgacgaggagagcaaggtgtttgacaagtggatcgccggcgcgacggagctgcctgccaacgtcaagaggagcatgcaagactacttcaagagggtcgcgctgaggctaggagcgcaggtcagggaaagaagggaggcggaaggtggtgccggcgggttggggcttgcgaatgacgaggttgaggacgagaaggaaatcatggctgtgggaaaagttgaggttggctcggatgtgttttcggcggagtag

SEQ ID NO: 4277 - protein, 2673 aa, Myceliophthora thermophilia
MTEVAANDTPGSFDLEQAKAALTSSSTTARIAQLRGIDESISHKALDRTATLGILKVLFWTHAIYIDRPSRQAVQRCLASLCRVGDADVLAPLIAAVRQETQKHGIAPDSAFVLVEWSSLLTQHFAGTPLWDKFGKDIILATADGLEKCLQPTAKGTIGSSALVITRRALRKLAAADQKAIDAAVQLLTAKGSQPAAKYAVLLGAIAGVCSRKPEAKPVVEGLKNQYLAFYVREIVGSRTPVPAHQANGLGDFFSAFVSLEDLEKEVFPALEKGLLRAPEVVLNDLITPLVRSLPQFDLSKTLSGRFVKPLLSNIKSSNATIRSGAVTAFRVIASSSQDFTLLEQAADEVLGPLKSGKLASADHRVLHSEMLVALPLSTSIATKIASGLPALVGKEANEAALSAETLALNASATALLRDGEAPKTLLDAYAKGLADKKAPIRRIWILRTGDLLQTFAEKPKADLPKSVVTFAEAVLPPLLSTFNEVVANPIAAAQSGLVSAALVVCALESLLSRLESANVQSLLQKPSIQKNSLAVEPKPSYLLNQRIYSKFSGDDSKWLCRALSEIVPALSSSPEAVRIAWAQAYIYLICSTGSSPDVRRQTINALSGLCAQKAAADGASVASEIINGLWHWIEALEAAEKESAAVLAKSGNSNLHLVLKSICPPKGSASRDGSDADSTQKESQMCSLLVLARPQLIPRASWIDLCLRVGLDPGELAKKHEETLIQEIVGRTSYGQKSEAVKNAAYSAAAELVFVAPESMTQRIVDLIRNDLDTSQLQTVGPLEAAIFRTPEGTAFVDVLAKKQNVVPNKNVKDYDLLKWEEELRAQLAEKKGIQKKLTADETAKVNAQLKKEAEIRDQVRQIASRLLRGFGIVKALATGPPSDVRRWIGAAISATLTSIKAGATLITAETGPMAFVSCAEQVSSRLGTIRPFIGAATLRAHDVSALPEELTQEPFEDLVTRVLFRLRFASEQRPFDVVTLVYILPLLLLVLEKGGFGGNADDRDAQLVLAIETLSFHTDVTADEAIPRAEILDGLILAMQRYSQHYKILKDCFSDMVRCVAPNISSEEIGVLSRGSIVPQASVRTAVLQAISAEVDMSEVGVSEEMWIACHDDIEENVELGREIWEESEFQVSEELAHKMLPYLESKDAQLRRAAAKSLAEAASQNPTVIPPILEKLQSSYVELAKPRVQELDEFGMPKKMDLSDPWEARHGIALAFRHLAPDLGKAQLEPFFNFLIEQGPLADRNATVRSTMLDAANTAIEIHGKGVLDRLMKTFEKTLEAPDKNSEAADRVNEAVIIMYGALARHLKPGDKKIPVVIERLLATLSTPSEAVQYAIAECLPPLVRTCGDKSSKYIDQVLETLLTSKNYPEQRGAAYGLAGLVLGRGINVLREYRIMITLSSALENKKEIRQRESAMLAYELLSTILGRLFEPYVIQIVPQLLAGFGDGNADVRDAALAAAKACFSSLSSYGVKQILPTLLDGLEEDQWRSKKGACDTLGAMAYLDPQQLAQSLPEIIPPLTAVLNDSHKEVRAAANKSLKRFGEVITNPEIKGLVDILLKALSDPTKYTDEALDALIKVQFVHYLDAPSLALISRILQRGLSDRSNTKRKASQVIGSLAHLTERKDLVAHLPVLVAGLKVAVVDPVPTTRATASRALGSLVEKLGEDALPDLIPGLMHTLKSETGAGDRLGSAQALSEVLAGLGTARLEETLPTILQNVESPKPSVREGFMSLFIFLPVCFGNSFANYLGRIIPPILSGLADDVEAIRDTALRAGRLLVKNFAVRAVDLLLPELERGMADDNYRIRLSSVELVGDLLFNLAGVKSKTEEEEQDQDVTKEAGASLREVLGEEKRNKVLSALYVCRCDTAVAVRAAAIGIWKSLVHSPRTLKELVPSLTQLIIRRLGSSNMEHKVIASNALGELIRKAGDGVLATLLPTLEEGLQTSRDVDAKQGICLALKELISSASPEALEDHEKTLISVVRTALTDSDTDVREAAAEAFDSLQQIVGKRAVDQVLPYLLNLLRSEADANNALAALLTLLTESTRSNIILPNLIPTLITPPISAFNAKALASLSKVAGAAMNRRLPNIINSLMDNIVNCTEDELREDLDASFDTVILSIDEYDGLNVVMNVLLQLIKHDDHRKRAATARHLGKFFAEAGVDYSRYNQDIIRALLISFDDRDMEVVKAAWGALNEFTKRLKKEEMEALVQSTRQTLLQVGVAGHNLPGFELPKGINAILPIFLQGLMNGTAEQRVSAALAISDIVDRTSEESLKPFVTQITGPLIRVVSERSTEVKSAILLTLNHLLEKMPTALKPFLPQLQRTFAKSLADPSSDVLRSRAARALGTLIKFTPRVDPLIAELVTGSKTTDAGVRTAMLKALYEVISKAGANMGESSRTAVLGLIDTETDERDVAMTITYAKLFGALVKNVSADVATGLLKNRVMTRDFSNASVLALNAVLLESPDTLLNSPLADDLPELLCQGMQHKDPYIVDSFITATGKYLLSDAPKAFETTKPIFATLAKIIPPGNPGDSRRLALVLVRTLARNNTDMVRPHLGLLAPPVFASVRDMVIPVKLAAEAAFVQLFAVADEESKVFDKWIAGATELPANVKRSMQDYFKRVALRLGAQVRERREAEGGAGGLGLANDEVEDEKEIMAVGKVEVGSDVFSAE

SEQ ID NO: 4278 - DNA, 534 bp, Myceliophthora thermophilia
atgcccttccaggactaccgcctcgccgatcctgaatggcaagttgaggtctccccgggccacaccgtgacagtcaacggcacggttcaagccgtgatcgaccagctggaaaagcgcgaccacgcaccccaggctgctgcggcgagggcggccactgcggctaccgacatggtcgcaaagcgcgccaccgacttcagcggcggaagctacatctgcgggcaccgctggccgtacgtcccgctccagccattgtgggaaggcctgcggtatctgcgcagtctccacggccaggtgcatgtcccgcccggaccgagaatgtgcagccaggttagctgttcgtactcggcggcggtttggatctgcaatgataataccaaggacctctacctggactcgttctcgcgcatcgccgacggcgttagctacatcatcgggttgtgcgcaacaaacgcctggggtcccacccaggtggccgggcaggtcttccaccctgatcattggaacattatcgtccgtcgtgataaatgcctctaa

SEQ ID NO: 4279 - protein, 177 aa, Myceliophthora thermophilia
MPFQDYRLADPEWQVEVSPGHTVTVNGTVQAVIDQLEKRDHAPQAAAARAATAATDMVAKRATDFSGGSYICGHRWPYVPLQPLWEGLRYLRSLHGQVHVPPGPRMCSQVSCSYSAAVWICNDNTKDLYLDSFSRIADGVSYIIGLCATNAWGPTQVAGQVFHPDHWNIIVRRDKCL

SEQ ID NO: 4280 - DNA, 1434 bp, Myceliophthora thermophilia
atgtcgtctctttcagtccctcctcagcggccgtctatgtgcccccggcgggcgtcgagcagcagcttcgccgatgccttcgacgatgcccggagaaagctcgacgagatgggcgtgcaagaaccaggtgaggacgaagtgccgtcgccggcgctgtcctcgtctagctctgcgaccggtgagagcactccgttttctccgtcggaggaatcatcacccctgagcccagccacccccatgacggccccgaccacacccatggtcgatggcgtggccgacaacttcgcctttgccttcgacattgacggcgtgctgatccgcggcgggaagccgattcccgaggccatcgaggccatgaaggtcctcaacggcgagaacgagtggggtatcaaagtaccttacatcttcttgaccaacggcggcggcaagttcgagacggagcgctgccgcgacttgtctcagcagctccagatcgaggtctctcccggtcagttcatctgcggccacacgcccatgcgggagtttgccgaccggtacggcaccgtcttggtcgtcggcggcgagggcgaaaagtgccgccaggtggccgagtcgtacggtttccgcgacgtcgtgacgcccggcgacattctcaaggccaatgcggccacggcgccgttccgcaagctcacggaagccgagcacgccaactcgcgtgacctcctcgctcgccacggcgccaccaagctctccgacattgtcatcgaggccgtctttgtctttgccgactcgcgcgactgggcgtcggatttgcagatcatcctcgacatcgcccagtccaagggcggccgtctcgagacgcgctccgagactttcgacgagggtccgcccatctacttcagccacaacgacgtcctctggtcggccgcccacgagcacgcccggctaggcatgggcgcgctgcggcgcatcgtcgagaccgtctttgaagacacgacgggcggcaagaagctcaagacgcacgcgttcggcaagccgcaggtgtcgacgttccagttcgccacccgcctgctgcagcagtggcgggcgacccagcacggcctcgccgagtcggaacctccgcagaccgtctacttcgtcggcgacacccccgagtccgacattcgcggcaccaacgccatggacgagatctcgagcaacgagtggtacagcatcctcgtcaagacgggcgtgtaccaggatggcaccgagcccaagtacaagccgcgcaagctggtcgacacggtgctcgacgccgtccatcacggcatccgccgcgagatggcccgcgccggctcgcgcaaggacaccggcggtcgcatgttgccgctggatgacgctgcgctgaaggccgtcgacgagggacgcactcccgactttgaggtccgggagaaccctttcgtcacggtggtctaa

SEQ ID NO: 4281 - protein, 477 aa, Myceliophthora thermophilia
MSSLSVPPQRPSMCPRRASSSSFADAFDDARRKLDEMGVQEPGEDEVPSPALSSSSSATGESTPFSPSEESSPLSPATPMTAPTTPMVDGVADNFAFAFDIDGVLIRGGKPIPEAIEAMKVLNGENEWGIKVPYIFLTNGGGKFETERCRDLSQQLQIEVSPGQFICGHTPMREFADRYGTVLVVGGEGEKCRQVAESYGFRDVVTPGDILKANAATAPFRKLTEAEHANSRDLLARHGATKLSDIVIEAVFVFADSRDWASDLQIILDIAQSKGGRLETRSETFDEGPPIYFSHNDVLWSAAHEHARLGMGALRRIVETVFEDTTGGKKLKTHAFGKPQVSTFQFATRLLQQWRATQHGLAESEPPQTVYFVGDTPESDIRGTNAMDEISSNEWYSILVKTGVYQDGTEPKYKPRKLVDTVLDAVHHGIRREMARAGSRKDTGGRMLPLDDAALKAVDEGRTPDFEVRENPFVTVV

SEQ ID NO: 4282 - DNA, 192 bp, Myceliophthora thermophilia
atgaagagaccccctacctggatgggccactccagaggcctcgccctcatcgacccgggtatggagatcctctacaacgactgcgaccggtcgctgcaggacctgtggctgggcaagtcgggcgtcgaccgggacgtggtcgacatggagacggaacatatgcccttaacggttgttctctgcactagttag

SEQ ID NO: 4283 - protein, 63 aa, Myceliophthora thermophilia
MKRPPTWMGHSRGLALIDPGMEILYNDCDRSLQDLWLGKSGVDRDVVDMETEHMPLTVVLCTS

SEQ ID NO: 4284 - DNA, 1125 bp, Myceliophthora thermophilia
atggcaactcccacccgcacatccatctcttcgacgccataccgggaaggggtcgagctccgaattcgaaagcacgtcccgccggagccgtttggcggcggctatagaccatgtcctcggcgcaaagtcggggttaaccaagacgctacgagcgtcgaccgtgttgccctcgccctggacaacccgcccttggagacggagcccccggccggagaggagcacaccttcaccattacggggtcaaagaccctgaggcgcttccacgtcgacggcggtggtgctcacgttgtcactggctatttcgaccgagacaaggacgtcgtctgtctggccaaaatctacgacggcgtatactacccgttggagaaccaagacagcggctgggactgtatgacgctggccgacgccgattatgccatcgaggcttgggcttatgaaactatgcagcccgctgaaggggtaggcgccaagctcgtccccgagtactatggtacttggactttcgctgttgctaccaaccaacccggtcgccggcgctgggtacgcatgctccttctccagctcgtacgcggcgaaaccgtcctagacaaaatccgtaaggctactaagaacgacgctgtccagcaccccctattgcccgaccaggaaactcgtctccgagtcctcaaagataccttcgaggccgagacctccattttttggaacgccgaggtactccacggagacctgtcaccgcgcaacgttatggttcagcctgacggtagcgtagttataatcgatttcaaccaagcccgcgtttacccgttctactatcggccgcacccaaagtacgacgagggcgcccatccactccccccctcacccatcaagcgctactggccctttgcccctggcgcaggtaccttcgcagatccggggaaccagtgggcaagttgggtcccccagagctggctcgagaacccagaattggccgctgagtggctactgaaaacatggggaagccctacgccaggcaaatatgcacccttgtccgattatttcctcaaccacccggcccatgctgagaggagcaagaaactacaggcagctttggagaagctgggtcgcaaaccagcaaagaagtaa

SEQ ID NO: 4285 - protein, 374 aa, Myceliophthora thermophilia
MATPTRTSISSTPYREGVELRIRKHVPPEPFGGGYRPCPRRKVGVNQDATSVDRVALALDNPPLETEPPAGEEHTFTITGSKTLRRFHVDGGGAHVVTGYFDRDKDVVCLAKIYDGVYYPLENQDSGWDCMTLADADYAIEAWAYETMQPAEGVGAKLVPEYYGTWTFAVATNQPGRRRWVRMLLLQLVRGETVLDKIRKATKNDAVQHPLLPDQETRLRVLKDTFEAETSIFWNAEVLHGDLSPRNVMVQPDGSVVIIDFNQARVYPFYYRPHPKYDEGAHPLPPSPIKRYWPFAPGAGTFADPGNQWASWVPQSWLENPELAAEWLLKTWGSPTPGKYAPLSDYFLNHPAHAERSKKLQAALEKLGRKPAKK

SEQ ID NO: 4286 - DNA, 1398 bp, Myceliophthora thermophilia
atggctcccacctcagcacccgcgctcctatggggcggccgcttcactggcgcaatcgacgacttgatgttccagttcaacgagtcgctgtcgttcgacaaggtgctctacaaggccgacatccagggctccatcacctgggccaaggccctgcgtaagctcgacatcctgtcggacgaagagctgcatcagatcgtcacgggcctgcagcaggtcgagaaagaatgggaggagggcaagttcgtcattaacaccaagtcggacgaggacattcacacggccaacgagcgcaggctcggcgagctgatcggccccgctgccggcaagctgcacacgggccgctcgcgcaacgagcaggtcggcgtggacatgcgtctgtgggcgggggagcagctggccgacatcgccgaggcgctcaagggcctgctctcggtcagcgccgcgcgcgccaaggaggccctccctatcctcatgccgggctacacccacctgcagcgtgcccagccggtccgcttctcccactggctgctgtcgcacgccaccttcctcaagggcgacctgcagcgcctcgagggcgtccgggagcgggtctcctcgtgccctcttggcgttggcgcccttgccggcaacccgttcggcatcgaccgcgagttcatggccaaggacctcggcttccgctccgtgcaccccaacagcctgtgcgccgtggccgaccgcgacttcgtcgtcgagatcctgcagtgggctagcctgctcatggcccatctcagccgtctggccgaggatctgatcctcttctcgacggccgagtacggcttcgtccaggtcgccgacgcttacagcacgggcagcagcctgatgccccagaagaagaaccccgacagcctggagctgatccggggcaaggccggcagggtgatgggacaggcctctggcttcctggcctcgctcaagagcctgcccacctcgtacaacaaggacctgcaagagtcggtcgagcccatgatcgactgcatcaagaccgtgtccaactgcgtgcgcatcacccagggcgtgctcgccacgctcaccatcaacggcgacaagatgaaggcggccctgacggacgacatgctggccaccgatgtggccgactacctggtccgcaagggcgtgcccttccgccagacgcaccacattgccggcgccatcgtgcgcaaggccgagcaggcgggtgtgtccatctcggctctgccgctcaaggacctcagggagatctcgccgctgttcgaagaggacgtggcgcaggtgtttgactttgagaggagcgtcgagcagaggtcgacgtacggcggcaccagcagcagctcggtgctggcgcagatcgcggcgatcgaggagtttgttgccaagaattag

SEQ ID NO: 4287 - protein, 465 aa, Myceliophthora thermophilia
MAPTSAPALLWGGRFTGAIDDLMFQFNESLSFDKVLYKADIQGSITWAKALRKLDILSDEELHQIVTGLQQVEKEWEEGKFVINTKSDEDIHTANERRLGELIGPAAGKLHTGRSRNEQVGVDMRLWAGEQLADIAEALKGLLSVSAARAKEALPILMPGYTHLQRAQPVRFSHWLLSHATFLKGDLQRLEGVRERVSSCPLGVGALAGNPFGIDREFMAKDLGFRSVHPNSLCAVADRDFVVEILQWASLLMAHLSRLAEDLILFSTAEYGFVQVADAYSTGSSLMPQKKNPDSLELIRGKAGRVMGQASGFLASLKSLPTSYNKDLQESVEPMIDCIKTVSNCVRITQGVLATLTINGDKMKAALTDDMLATDVADYLVRKGVPFRQTHHIAGAIVRKAEQAGVSISALPLKDLREISPLFEEDVAQVFDFERSVEQRSTYGGTSSSSVLAQIAAIEEFVAKN

SEQ ID NO: 4288 - DNA, 351 bp, Myceliophthora thermophilia
atgtcttacaacaagcccgagaaggacttcggcgaggcccccaaggtccacaagatccgcatcaccctgacctcccgcaaggtgcaggcgctcgagaaggtttgccaggagctcattgagcgcgccaagaacaaggacctccgcgcgaagggccccgtccgtctgcccaccaagaggctcaagatcacgacccgcaagaccccttgcggtgagggttccaagacctgggactcgtacgagatgcgcattcacaagcgcctgatcgacttgactgctcctactgagatcgtcaagcagatcatcatcaacatcgaggctggtgtcgaggttgaggtcacgattgctgcctaa

SEQ ID NO: 4289 - protein, 116 aa, Myceliophthora thermophilia
MSYNKPEKDFGEAPKVHKIRITLTSRKVQALEKVCQELIERAKNKDLRAKGPVRLPTKRLKITTRKTPCGEGSKTWDSYEMRIHKRLIDLTAPTEIVKQIIINIEAGVEVEVTIAA

SEQ ID NO: 4290 - DNA, 1356 bp, Myceliophthora thermophilia
atggaagacgacggcttcgttctcgtttccagagaaagcacccaggactcctgtcctgaccatgttcccagacaggttgaggagtcttcgggttccaacaacaacttcgtatcagagatcggcatctatattgaatccttaggggagacactttggaagctaaaccaatacctccacgaaaacccggaactcgcgttcaaagagtacaaggcacaccaagccctgaccgactttctgcgctcgagggaggagaaatggcatattacgccgtcagcatgcggactggaaacggcatggatagccgtgcacgacagcggtagaaatggacccgtcgtgtcattcaacgttgagatggatgcgctcccaaatttggggcacgcatgtggccataacctcatcgccacggcttcgatagcagctggactcgccacggcagagctcatgaaacgacacaacatgcccggcaaggtcgttctctttggtacaccgggagaggaaggccttggaggaggcaaaattcaactgctaaagcggggagcctaccggggcgtggacatctcgttgatctcccatcccggaatcctgaacaatagccctctcgtccgaactaccgccttcgctcgtctagaggtagaatactttgggcgagcagcgcacggggccaagaatccgtggatgggaatcaacgccctcgacgcccttgtcgtttcgtataacgccgtgtcagctctgcgccagcaaacgaagccgggcgacgtgattggtgtagctatcaccaatggcggggaacaggcgacaaatgtgattcatgcatacgcagcctgcgtctgtatgatccacgcgacgacttcatcccgtctcgcggagctccaagagaaggtcagctcctgcttccgcgcgggtgctgttgccaccggcgcgaacgtcaacatcaccgtaacatccgggtatcaagatcacgtaccaaatcgggttcttgcggcttcatacaggcggtactggagcatgttgccagatccgccggaccccccgcttccagcagacgggcagtttacttgggtaaggtcgagcacagatcagggggatctaagccacgctttaccaagcgtgaatgcgagtttcgctatccctcctggtcctgaggcaggacagccgcacagtccagactttgaaaaggcgtcaggtactagatcagcttttgcaagagctttgagggtagggaaggcgttagctgggacagcaattgacgtgttgacaattcctggtctccttgacgaggtcaagaggcagtggaggcgagacatgaaggctacaagggagcagtttgaggagttctcggaatactcggactattaa

SEQ ID NO: 4291 - protein, 451 aa, Myceliophthora thermophilia
MEDDGFVLVSRESTQDSCPDHVPRQVEESSGSNNNFVSEIGIYIESLGETLWKLNQYLHENPELAFKEYKAHQALTDFLRSREEKWHITPSACGLETAWIAVHDSGRNGPVVSFNVEMDALPNLGHACGHNLIATASIAAGLATAELMKRHNMPGKVVLFGTPGEEGLGGGKIQLLKRGAYRGVDISLISHPGILNNSPLVRTTAFARLEVEYFGRAAHGAKNPWMGINALDALVVSYNAVSALRQQTKPGDVIGVAITNGGEQATNVIHAYAACVCMIHATTSSRLAELQEKVSSCFRAGAVATGANVNITVTSGYQDHVPNRVLAASYRRYWSMLPDPPDPPLPADGQFTWVRSSTDQGDLSHALPSVNASFAIPPGPEAGQPHSPDFEKASGTRSAFARALRVGKALAGTAIDVLTIPGLLDEVKRQWRRDMKATREQFEEFSEYSDY

SEQ ID NO: 4292 - DNA, 243 bp, Myceliophthora thermophilia
atgataagggctattgctcggggtattgatagtatagaggagttagaacgagtagagcatgaggaggctgaggcggcagtagcagtagaaacttctggggttactacgtcttcttcgaccctatctcgtttgtctgccgatttcgggcagctttgggatactatgtatcctgaagttcctttagatctatccttgctggccgatttcgggttggtttctggtctgtcgcttttggttaattag

SEQ ID NO: 4293 - protein, 80 aa, Myceliophthora thermophilia
MIRAIARGIDSIEELERVEHEEAEAAVAVETSGVTTSSSTLSRLSADFGQLWDTMYPEVPLDLSLLADFGLVSGLSLLVN

SEQ ID NO: 4294 - DNA, 1257 bp, Myceliophthora thermophilia
atggttaacgtctggtccagatacgggggcacagcgatgctgtctcgcgacccgagagatctgcaactcgtcagcgacagcgtcgattttctgaaacgccaactcgaagccggcaacgtcatctatggcgtcaacatcgggttcggcggcagcgcggacaccagaacgcagcaccttgagcagctccagagcgcagccattcagcatttgaacgttggtatcctgctcaaagccgacaagacggacgcggaggaggcagaccggagccaggacaatggcctgctgcggagccatacgctcccgacccccatcgtcagtagcagcagcagcagcagcagcgaagacggaaagacgaggatcctgtcggcaagggagacgctcaagctggccaagctcgaaccgttgcgcctccaggccaaggacgggctcggcatcatcaacggaaccgccccgcttcttacggccatgggaaccgaagccctgggagggacggccaacaactaccaccccttcatctcctcggtccgcccgcacccgggccaggccgaggtggcggcgtgcgcgcacccggtcagcgcgcacgtgctgccggccgagatggccaaccagagcgtcaactcgatggccctcgtcgccgcccgctgcgccctcgacgccgcctacgcctacgtcctctgccaggccctcggcctgcgctgtctgcgcctcgagttcggtgcccgcgtgggcgccgtcgtcagggacgtcgtggagcgctgtttcttcgacggcggtggcgagagccgggggagccaagatgaagagggaaagaaggtgaaggaggacaaggaggcgatcgtggagggggtgaaaacggcggtgctcgggcggtgggaccggctggcgcacctggaccgcgcggacaggtgccggacggccgtggacgagtcgctcggtgcggtgctgggggcgtctgatcgccgagtgcggcgcttcgtcggtggaggggctgcgcgagtaccaggcccggatggccgcggcgctgggggagtgctacgcgcgacgtgcgggacgagtttgcgcgccgccggaccacggccgactaattacatcagcctggcgtccagggtcgtgtacgacttcatgcgcaaggacctgaggatcccgctcaaccggggcgtcgaggaccgccctccgctgctgctgcgcaaggccgaggaggccaagaagcgaggctccgacaggatcatgaagttcgggaaggagtcgggcatctag

SEQ ID NO: 4295 - protein, 418 aa, Myceliophthora thermophilia
MVNVWSRYGGTAMLSRDPRDLQLVSDSVDFLKRQLEAGNVIYGVNIGFGGSADTRTQHLEQLQSAAIQHLNVGILLKADKTDAEEADRSQDNGLLRSHTLPTPIVSSSSSSSSEDGKTRILSARETLKLAKLEPLRLQAKDGLGIINGTAPLLTAMGTEALGGTANNYHPFISSVRPHPGQAEVAACAHPVSAHVLPAEMANQSVNSMALVAARCALDAAYAYVLCQALGLRCLRLEFGARVGAVVRDVVERCFFDGGGESRGSQDEEGKKVKEDKEAIVEGVKTAVLGRWDRLAHLDRADRCRTAVDESLGAVLGASDRRVRRFVGGGAARVPGPDGRGAGGVLRATCGTSLRAAGPRPTNYISLASRVVYDFMRKDLRIPLNRGVEDRPPLLLRKAEEAKKRGSDRIMKFGKESGI

SEQ ID NO: 4296 - DNA, 3531 bp, Myceliophthora thermophilia
atggggacagagaacgagctggacgtcgaggggcagacggagcctcctatatgtggcctcaagagttccgtaacctgcactgcatctcccactctggtcgggaccgttagatcagacggcgatgccactgatgccgatgtcaatgccgatgtcgatgccgatgccgatgccactgttggccgcggctccatcaccagcaccgttgacacggcgcgcgtcttgatccccgagtgtgcccacaccctcactgtgcctgacgtttgcgcgttgcttgagacaaatatcgacaatggaatcgacggctccgaggcggctcgtcgcctacagcaccatggccctaacaaggttgagggagctaaagggctatccgtgtggacgattctcttgaggcaggtctccaacagcctgactctcgtcctcgtcatcaccatggtcctctccttcgcgattgcggaccacattgaaggcggcgtcatcgccgccgtcattctgctcaacgtcgtggttgggttcatccaggacttccgcgccgagcagaccatccaggcgctctatgcgctgtctgccccgacgtgcaaggtgatccgcggcggccaggcggataccatcaaggccgaggccctcgtaccgggcgacctggtcaggctcggggtgggcgacattgtccccgccgacctccggctcgtccacagcatcaacctgtccaccgacgaggccctgctcaccggcgaatcggtgcccgtgagcaagcatgccgagatggtcctcaaggaccgcgacgtgcccctgggcgaccgcatcaacatggtgtactcgggcagcaccgtctcgcgcggccgcgccaccggcgtcgtcgtcgccaccggcatggccaccgaggtcggcaagatcgccgccctcctcaagaggaacccccagagcgacgggcggcagcgtctgagcgtcgccggcagggcctgggccagattccggagcggcctccgcgtcctgctcggcctcgacggcactccgatgcaggtggccctgagcaagtttgcgctgctgctctttgccctggccatcgccctggccatcatcgtcttctcggtcagccggtggcgcgtgacgagcgaggtgctcatctacggcatctgcgtcgccgtcgccgtcatccccgagtcgctcatcgccgtcctcaccatcgccaccgccctcggcacccgcgccatggccaagggcaacgtcgtcatccgcaagctcgccgccctcgaggccgtcggcggcgtgaccaacatctgctccgacaagaccggcacgcttacccagggccgcatggtcgccaagcgcgtctggctcgaggacggcaccgaggtgtcggtccgcgacaccacccaccccttcgaccccgccagcggaaacgtgcgcgtgggggaagacgagtacagccccgtcctgtccccggccgccgagaagaaggcggcccggctgagggccttgctcgagacggtcgccctgtgcaacaactcgagcgtcaccaccacccaggctgccgctcccgccgcccccggcgcccctgccgcccccagtggtggtgctggtgccggtgcctacgccgccgtcggcgagcccaccgagatcgccctccaggtcctggccatgcggttcggcatgggtaagcccgagctggtgcgcttggacggcggcggtggcggccgccagctcctggccgagttccccttcgactcgtcgtgcaagcggatgacggtagtctacgccgacgaggccggcgacggcggcgcctcagcctacaccaagggcgccctcgaggccctgcttcccctgatggacctctcggacgagcagaagacggccgtcgtggccaaggccgagtcgctggccgccgagggcctccgagtcctctgcgttgccaagcggtccgtcgacccgggcctcttctcgtcgacgacgacgaccaccgcgccgagccctctgactggtgtcgacgacgccgagaaggcggtcgtacaggagggagggacgcgggcgctgccggcaggtcacgacaccacggagcacctgcgctcggccgtcgagaaggacctcagattcctcggcctggtgggcctctacgatcccccgcgcgtcgagtcggccgcggccgtgcagcggtgccagcgtgccggcatcactgtccacatgctgacgggcgaccacgtcaagacggcgacggcgatcgcgtacgagattggcatcctgagccgagcagccaaccaccacggcggcagcaacgactacgacaagaacaacaacaacaacaacagggacaccaccatcatggtggccagcgccttcgacggccttagcgacgcccagatcgaccagatggagcgtctgcccctggtcctggcgcgctgcagcccggcgaccaaggtccgcatggtggaagccatgcaccggaggggggccttctgcgtcatgaccggagacggcgtgaacgactcgcccgccctcaagaagtcggacgtcggcatcgccatgggccttaacgggagcgacgtggccaaggaggccgccgacatggtcctgaccgacgacaactttgcctccatcgtcaccgccatcgaggaggggaggcgcctgtttgacaatatccaaaagttcctgcttcatctcctcgtctccaacattgcccaagtcttcctcctcctcatcggcctggccttcaaggacgaggacggcgtctccgtcttcccgctctcgccgctcgagatcctctgggccaacctcgtcacctcgtccttcctcgccctcgggctcggtatcgaggaggcccagcccgacatcatgcagcgcccgccccacgacctctcggtcggcgtcttcacgcgcgagctcattaccgacaagttcgtctacggcaccgccatgggcggcctctgcctcgccgcgttctcctcggtcgcctacggcggcggcccccccggcagccgaggggaagggggcgcttcccgcgccctgggccgcgactgcaacgaatcctactcggacgtctgccgcgtcgccttccgcgcccgcgccaccaccttcgccaccctgaccttcctcctgctggtgaccgcctgggaggccaagcactttacccgctcgctcttcgccatgtacccggaggaggaggaggagaagtacaacaacaacaacaacaacgacaacgacaacgacaacaacaatgggcggcatgggcggcggcggcggcgccgctcgggcacgggccccgcctcggtcctgcggaccgtctggcgcaacaagttcctgttcggcgccgtcaccgccggcttcgtcatcgccttccccgtcatctacctgcccgccgtcaaccgcatcgtcttcaagcacgacgccatcacctgggagtggggcgtcgtcgccgcctgcgtcgtcgtctacacggcaatcgtcgagtcttggaaggccgtcaagaggcgcttccgcctgggaaccaccgcggcagcttcggcggcttccccggcgtcgcgcacggtgggcgaagtgtga

SEQ ID NO: 4297 - protein, 1176 aa, Myceliophthora thermophilia
MGTENELDVEGQTEPPICGLKSSVTCTASPTLVGTVRSDGDATDADVNADVDADADATVGRGSITSTVDTARVLIPECAHTLTVPDVCALLETNIDNGIDGSEAARRLQHHGPNKVEGAKGLSVWTILLRQVSNSLTLVLVITMVLSFAIADHIEGGVIAAVILLNVVVGFIQDFRAEQTIQALYALSAPTCKVIRGGQADTIKAEALVPGDLVRLGVGDIVPADLRLVHSINLSTDEALLTGESVPVSKHAEMVLKDRDVPLGDRINMVYSGSTVSRGRATGVVVATGMATEVGKIAALLKRNPQSDGRQRLSVAGRAWARFRSGLRVLLGLDGTPMQVALSKFALLLFALAIALAIIVFSVSRWRVTSEVLIYGICVAVAVIPESLIAVLTIATALGTRAMAKGNVVIRKLAALEAVGGVTNICSDKTGTLTQGRMVAKRVWLEDGTEVSVRDTTHPFDPASGNVRVGEDEYSPVLSPAAEKKAARLRALLETVALCNNSSVTTTQAAAPAAPGAPAAPSGGAGAGAYAAVGEPTEIALQVLAMRFGMGKPELVRLDGGGGGRQLLAEFPFDSSCKRMTVVYADEAGDGGASAYTKGALEALLPLMDLSDEQKTAVVAKAESLAAEGLRVLCVAKRSVDPGLFSSTTTTTAPSPLTGVDDAEKAVVQEGGTRALPAGHDTTEHLRSAVEKDLRFLGLVGLYDPPRVESAAAVQRCQRAGITVHMLTGDHVKTATAIAYEIGILSRAANHHGGSNDYDKNNNNNNRDTTIMVASAFDGLSDAQIDQMERLPLVLARCSPATKVRMVEAMHRRGAFCVMTGDGVNDSPALKKSDVGIAMGLNGSDVAKEAADMVLTDDNFASIVTAIEEGRRLFDNIQKFLLHLLVSNIAQVFLLLIGLAFKDEDGVSVFPLSPLEILWANLVTSSFLALGLGIEEAQPDIMQRPPHDLSVGVFTRELITDKFVYGTAMGGLCLAAFSSVAYGGGPPGSRGEGGASRALGRDCNESYSDVCRVAFRARATTFATLTFLLLVTAWEAKHFTRSLFAMYPEEEEEKYNNNNNNDNDNDNNNGRHGRRRRRRSGTGPASVLRTVWRNKFLFGAVTAGFVIAFPVIYLPAVNRIVFKHDAITWEWGVVAACVVVYTAIVESWKAVKRRFRLGTTAAASAASPASRTVGEV

SEQ ID NO: 4298 - DNA, 1542 bp, Myceliophthora thermophilia
atgtcaacaccgcggcgaagcacatatgtgtactctggtaccgggtaccagccattcgccgttcaagaggaccgcccgcttcctgacccgtaccggtctttacgcggccctccacctgcccaagccgaggaagcgggttttcagtccagccagtcgaccatccggggttcacccaccgcttcgggccggtcgtctacggaatacagcgagagctatgttggagacattgaaaaaagcctgcataacgacaccgtcccttccctccctctccattctctccagtcagacaatggcagccatgacggggagcagcaagacaaggagaagtacggagcgccgggtgtggaaatgaagtcgacaacgaccaccaccggcgctgctgcggaccactcgggagagacgggagcacgagcacgccctaagctgcccatccgcgagcgcctcaagcacttcacgtgggcgtggtacacgctcatcatgtccacgggcgggctgtcgctgctgatgcgcgcgcagccgcaccagttccccggcctgttccagatcgggctggccgtcttcgtcatcaacatcgtgctgttcgtgctggtcacgttggcgcagatcgcccgctttgtcctgttcccgggcatcttcgcccggtcgctgggccaccggcgcgagggcttcttcttcccgaccttcttcctagcggtggcgacgttgattacgtgcacgcagcggtactgcgtgcccgaggacgcggacgaggcccgggcgacggcggggacgctgctgtggctgctgcgggccgccttctggacctacctgttgctggcgacgtgcgtggccgtgggccagtactcgtacgtcttctcggcgcacagcttcggcctgcagaccatgatgccgacctggatcctgcccatcttccccgtcatgctctcgggcaccatcgcctccgtcatcgccggatcccagccgcccgaggaggccgtgcccatcgccgtcgccggcctgacctgccaggggctcggcatcgccgtggccttcatgatgtacgcccacatggtcggccggctgatgcagtccggcctgcccgaccgggaacaccggaccggcctcttcatgtgcgtcggcccgcccgccttcacggcgctggccttcatcggcctggccaccggcctgccccaggacttcgaccacgacatggacggcttcgtcgacgccgtcgtcatcgagaccatgggcctggtcggcgccggcttcctgtgggcgctgagcttctggtggttcggcatcgccctcctggccgtcctccagagcccgcccgagcacttccacctcggctggtgggcctccgtcttccccaacacgggcttcgtcctggccaccatctcgatcggcaaggcctaccacagcgagggcatcctctggctgtcgaccgccctctccgtcgtcctgctgctcacctacctgttcgtgctgtaccatcacgtgcgcgccgtcatagtgcaggacattatgtatccggggcgggacgaggacgtggaggatcattaa

SEQ ID NO: 4299 - protein, 513 aa, Myceliophthora thermophilia
MSTPRRSTYVYSGTGYQPFAVQEDRPLPDPYRSLRGPPPAQAEEAGFQSSQSTIRGSPTASGRSSTEYSESYVGDIEKSLHNDTVPSLPLHSLQSDNGSHDGEQQDKEKYGAPGVEMKSTTTTTGAAADHSGETGARARPKLPIRERLKHFTWAWYTLIMSTGGLSLLMRAQPHQFPGLFQIGLAVFVINIVLFVLVTLAQIARFVLFPGIFARSLGHRREGFFFPTFFLAVATLITCTQRYCVPEDADEARATAGTLLWLLRAAFWTYLLLATCVAVGQYSYVFSAHSFGLQTMMPTWILPIFPVMLSGTIASVIAGSQPPEEAVPIAVAGLTCQGLGIAVAFMMYAHMVGRLMQSGLPDREHRTGLFMCVGPPAFTALAFIGLATGLPQDFDHDMDGFVDAVVIETMGLVGAGFLWALSFWWFGIALLAVLQSPPEHFHLGWWASVFPNTGFVLATISIGKAYHSEGILWLSTALSVVLLLTYLFVLYHHVRAVIVQDIMYPGRDEDVEDH

SEQ ID NO: 4300 - DNA, 5031 bp, Myceliophthora thermophilia
atgacgtcgaatggcgtgcccgttaaccagccgcccgacccgaccctcgacgccgtaatggatggcctccccgaaccctttccggcgcccgacccgactcggtttccaaatacgcggcgccggatatcgtcctcggctacgaagggctttcgaacgaaccccccagactcgcagacttccgatcctgacacatgccgcatatgcaggggagagggctcagaagacgagccgctcttcttcccctgcaaatgcagcgggagcatcaagtatgtccaccaggactgcttgatggagtggctttcacactcgcagaagaagcactgcgagctgtgtaagacctctttccgcttcaccaagctttacgatcccaacatgccgaaatccctaccagtccatgtgtttctccggcacacagccaagtatctgctccgcaacctgcttgtctggatgagggctgcattggtcgccaacgtttggttggtttggttgccctatttgatgcgcaccatatggtcgtttctgttctggatcagcgacgaggggctgggcgggaaggcggtcgtctccggagtgggtagtggcgagtttgacttgattgctggagcctcgcacaactccaacgtgtgcccctccagtccgctatttgcggcgactaccaccgtcgcctcgattgggggtgtgatcgacaacctcccgccggaatccgcaaggttggtcaagggcctatatggcatcaagctgacatccagcgaccccatctattccgccatcctgcgactattcttcggccccgtggccaccagagacaagcccgctgtcggtttaaacgcgactggggccgcgccgacgccgagcttatatcacaagtccctgctcagcgacgtcgactttctccgcaacctaacgcgacatccgtccatcaaccgggcggtcattcacgtgctggagggccagatcatcaccatcctagtcatagtgtgctttatccttatcatcttggttcgagactacgttgtacagcagcagcccgagatcaacatgcgtgccgccttcgccgcggttgagaacccggtgcaacccgcggctgtggagccggccaacgctgaagtccaggccgaagcggaaccagatgacgaacagtttgaggatgttctagacgagacgacggatgctttcgacgatacaaacagcgagactgcggacgaagatctgagggccaccctccgcgaccgtctccctgacgaaccggccgaatcctcttcacggccgatgtccccaaatctcgtgccaccgactatcccggcccaaggaaatgacatgcaaggacttgatcggacgacaatacaagagtacctcgacatataccgcgaggcgggcggtaacctggaagaggttttgaggatcgcgcgggagcgcaacctcgaggtcaagttggaccattggatgcggttgaccagatctatgatggcacgccagcgagacaacgacgcagtcagaactgaccaggctgagccttcgggatcagtagccctgcgtgaagagaagtcggataccaatccgttcggtccactagtcgacgagtcagagacaagcgaggaaaacaactccaaggggaaagagatactggtagaagatgcagaagacacctggggccagccgatgggcctccccttgcggccgagggcgcatactgacggccctttgatcaataacacagtcaacccctttgcaaacaacaactggtcctttacagacctacctccagaccccccatctcgagattcggtggttcccgaatctgggattcaaaggccgtccgaacacgccttcccagcttgggaggcaccagaatcctcaagcgacgcgaccgcacctcgcgaccgcggggcctcaaccgatgattcttcgcaggccctgcccgttggccccgattctccaaaccgagcggacgcgcagccagtgccccaagcccccaatgcacggggccccgcaggtttcataggccggattgccgattttatgtggcggcaggttgacgctattgatccagatgaccttgctcctgttgatttccttggcgattttgccgaagatgaacccgaggaggaagtcgtggaaaacgcgccggccaacgaagcggggcaggatcggcaaggtgccgatgcagcgggtggactcgacgccgaagcgattgaagatgcggaggacctggaaggcattttggagcttctcgggatgcgcggcccggtcgccggcctgttccagaatgccatattctgcgcatttctcgtcagtatcaccatcttcgtcggcgtcttcatcccgtacaacatcggccgcgtcacgatatggggacttgccaaccccatgcgcatcgctcggatgctctttagcctctccaagtttctccaggactgccttctgctattcttaggcttggcatcctcgaccatctccgagtcattctacttgctgagccgggcgctgtggctgtcgtccgtcgccgactactcgctgagggccgtcaatgcgtcgtggtttatggcgctcggcgctgcaaacaggatcggggccggcttcgtgactgagttgcccctgatatctgcatcggaagtgcgcaatttctctgccatcagccacgctgcgttgttcgtgctgaaggaccgcatcgtcctggccttgtcaagcttgtggcacttcgttgagttcttcttcggaggcgactataccgtcaaaggtgcggaagcatatgccgcagccgcaaaaatactagtgtttgtgaagcgattgttaccaaccgtcttcaatccgacttcgtgggttctcaatttcgacctgcccaaaaatacggacacgatcaatcacgagcttgcctactgggccggcatggacaggttctgggccacgctcgcggggtacatcgccatctcgctcatggccgcgctctatctgcggcgaggtgctcccctttctaccacccaggcagcgcaagagtgggaagcgtccatcattgacggactcaaccaagcaagcggggtcatgaaggtcattctcatcatcagcattgagatgctcgtctttcccctctactgcggcatgcttctcgacgtcgctctgctcccgctcttcgaacacacgacgctcaaatcccgccttctcttcaccctcaactacccggtcacatccatatttgtgcactggttcattggcaccggctacatgttccactttgcgctctttgtgtccatgtgccgcaagattatgcgcaagggcgtgctctacttcatccgcgatccggatgaccccgagtttcatccggtgcgggacgtgctggagcgtaacgtaacgacgcagctgcgtaagatattgttttcggcgttcgtctacggcgctctggttgtcgtctgtctcggtggcgtcgtatggggcttgtctgtgtcccttccggtcttaccgattcactactcgtccaacgagccggtgctcgagtttccgatcgacctgctgttttacaacttcctaatgccgttcgccgtcaagttcttcaagccaagccgcaggctccatgccatgtatacctggtggttccgccggtgcgctcgagctctgcggatcacgtggtttctcttcggcgagcggcgggtcgatgaggagggccagctcatactaccccaggattcgcctgatcgcaaccttccattctggagacggtggttcctcgaggttgacagcaacggccgcgttgtggcaaggtcgtggcgcggtattcttcaaggcggcacggagaagagtttggcaacgaaaaaggaacgcattccacggaaagagagcttaattcggtccggtcagctcatccccgatggacggttcgtccggacgcccgcgtccgaccaggtcaagattccgaaaggcgccgcggtgtttctcgacgtggacgagaacaacaagagactagacaaactgcccgaaacagacatctactcgaccaaacagtaccagctcgtctatgtgccaccccacttccggttccgtatcttcctcttcatcctcctcatctggatttttgccgccgttacgggtgtctccatcactataattccactcgtctttggccgatggatgctcaagcagctgatcccgccgcacattcgcaccaatgacatctacgcctttagcatcggcattcatattctcggctccgcgtcgtacgcgctgttccgcgtacgggccatctacagcactaagaattatctggcagcggccctgggagccctcggccatcgcgatgtgttccggagaacgtggcatgcagttagccgcgctgcccgggtcgcctttacctacttctttaccctggtggtgtttccgctcctcgccgcgtcgctgttggagctttacgcccttgttcctctcaacgaggtgatgtacgggagtgtgctcaggcctggcttcccaaactcggtcgctgccggaagcgtcaagcctacagttccgacgcataccatccgcgtggtccagacctggacgctcggccttctctacctgaagctggccatgcgcatcaccaacacggtgttcaggggctcacgtgtctctaacgcggcaagagccgtgattcgacgcgggtggctggacccagatgtctcgatcctcacacgggtgttcgtcatccccggtctgacgatatggctagttgccgtggcgacgccattgcttctggccaagaccgtcatcgccaacggcttcgcgcacactttgatcaggaacttcgtcacgggtccggttcatgaaccgcccgatcaggcactgtacgacgtgttcgtggtgctgatataccgcatgagctttccgttcgtagcgttcgtcatcctcggcggcctatccctgtggagcatgcttggcgtctttcgaagctggcaggtgcggatccgggacgaggcctatctgatcggcgaaaggctccacaactttggcgggacaaacgcgttccgggaccgggccgtgtggagacatggccgacgaagaatttga

SEQ ID NO: 4301 - protein, 1676 aa, Myceliophthora thermophilia
MTSNGVPVNQPPDPTLDAVMDGLPEPFPAPDPTRFPNTRRRISSSATKGFRTNPPDSQTSDPDTCRICRGEGSEDEPLFFPCKCSGSIKYVHQDCLMEWLSHSQKKHCELCKTSFRFTKLYDPNMPKSLPVHVFLRHTAKYLLRNLLVWMRAALVANVWLVWLPYLMRTIWSFLFWISDEGLGGKAVVSGVGSGEFDLIAGASHNSNVCPSSPLFAATTTVASIGGVIDNLPPESARLVKGLYGIKLTSSDPIYSAILRLFFGPVATRDKPAVGLNATGAAPTPSLYHKSLLSDVDFLRNLTRHPSINRAVIHVLEGQIITILVIVCFILIILVRDYVVQQQPEINMRAAFAAVENPVQPAAVEPANAEVQAEAEPDDEQFEDVLDETTDAFDDTNSETADEDLRATLRDRLPDEPAESSSRPMSPNLVPPTIPAQGNDMQGLDRTTIQEYLDIYREAGGNLEEVLRIARERNLEVKLDHWMRLTRSMMARQRDNDAVRTDQAEPSGSVALREEKSDTNPFGPLVDESETSEENNSKGKEILVEDAEDTWGQPMGLPLRPRAHTDGPLINNTVNPFANNNWSFTDLPPDPPSRDSVVPESGIQRPSEHAFPAWEAPESSSDATAPRDRGASTDDSSQALPVGPDSPNRADAQPVPQAPNARGPAGFIGRIADFMWRQVDAIDPDDLAPVDFLGDFAEDEPEEEVVENAPANEAGQDRQGADAAGGLDAEAIEDAEDLEGILELLGMRGPVAGLFQNAIFCAFLVSITIFVGVFIPYNIGRVTIWGLANPMRIARMLFSLSKFLQDCLLLFLGLASSTISESFYLLSRALWLSSVADYSLRAVNASWFMALGAANRIGAGFVTELPLISASEVRNFSAISHAALFVLKDRIVLALSSLWHFVEFFFGGDYTVKGAEAYAAAAKILVFVKRLLPTVFNPTSWVLNFDLPKNTDTINHELAYWAGMDRFWATLAGYIAISLMAALYLRRGAPLSTTQAAQEWEASIIDGLNQASGVMKVILIISIEMLVFPLYCGMLLDVALLPLFEHTTLKSRLLFTLNYPVTSIFVHWFIGTGYMFHFALFVSMCRKIMRKGVLYFIRDPDDPEFHPVRDVLERNVTTQLRKILFSAFVYGALVVVCLGGVVWGLSVSLPVLPIHYSSNEPVLEFPIDLLFYNFLMPFAVKFFKPSRRLHAMYTWWFRRCARALRITWFLFGERRVDEEGQLILPQDSPDRNLPFWRRWFLEVDSNGRVVARSWRGILQGGTEKSLATKKERIPRKESLIRSGQLIPDGRFVRTPASDQVKIPKGAAVFLDVDENNKRLDKLPETDIYSTKQYQLVYVPPHFRFRIFLFILLIWIFAAVTGVSITIIPLVFGRWMLKQLIPPHIRTNDIYAFSIGIHILGSASYALFRVRAIYSTKNYLAAALGALGHRDVFRRTWHAVSRAARVAFTYFFTLVVFPLLAASLLELYALVPLNEVMYGSVLRPGFPNSVAAGSVKPTVPTHTIRVVQTWTLGLLYLKLAMRITNTVFRGSRVSNAARAVIRRGWLDPDVSILTRVFVIPGLTIWLVAVATPLLLAKTVIANGFAHTLIRNFVTGPVHEPPDQALYDVFVVLIYRMSFPFVAFVILGGLSLWSMLGVFRSWQVRIRDEAYLIGERLHNFGGTNAFRDRAVWRHGRRRI

SEQ ID NO: 4302 - DNA, 1785 bp, Myceliophthora thermophilia
atgaatgagattgccgccgccatcatgccccgcttcgaaaacggaccgagtatggtatcgctctcgtctcaagaatcgacacagtctggccagtcactcgctactccccaggaaggggcttccgaagcaccgccaatgaccccgcgagatgacttgcgcacgaatcccatggaggagcaactactggccgccatcgcccattcacccgcggaacgttcaccttcccgatcggcgagtgtcccctctgagcactcagagtcgcacggctttatcagttcggcgaacatcaagatcactttcttcagggcggccgccaccatacggcggaccatgaatctagactgccgcatgttcctggatgccgttccaagttcctacctggaccgaccggaccagccgtcgctcgactcaagggaccccccacgctccccaacagaagggccgttttgcgcaacaatagtcaagcctgtcgctggccacggcaccgacgctgctacacattcaaattttcagctgcctgaagtatcgccgcatcgcttcattcaagcatatccgagaggccatgttttcactgccgacgaacttggccctattgacgacagctatggcttgggaaaaccttttcagtcacgacccgctgccgataagaagagcttgcggctgaggaacgacattaccgcactctttcgtatcctgcccgctgccaaatacatcatcctcctccccttgtggcattttcagcgggagtgctggtacactgccacattcggttgggtcgaagacccaatacgggccgtgaacgttggcgagctcggtctgatttcagctttcggaagctcggtcatggctgaagtatcacggctggagacgctggctgccagccgtgccaagtcggactttgtttcgtcccccagccatgagctgcgaagcccgctccacggtatcatggccagcagcgaactggttcgtgagggaatatcggaccgaacactcttgtcaactctcgacatgccggactcgtgtgctaccactttgctcgatactttcaataacctacttgaccatgctgtcgtgacccattctgggcttaagcgcggttccggggcattgctgacctcgaggatacgcgaaacggacttgggagctctggtgaggaggtcgtggaggtcgttagatagggcacagggcttgccgaaccatcccgtgttcatcacgatacagaccgagaaacgccagtggaagctttccatcgacgtgggcgtttggaaacgtattgtcatgaacgtcttcggaaatgctatcaagtacaccagtgccggccgcgtcgagattgtgctgcgggttgtcaagagaacggacaggacaggcagagaatctgactatgtgtcttttacggtagaggacacgggcgcaggaatgagttcagactttatcaagtatcgcctgttcacgcccttctcgcaagaagacagccatgccccaggaatgggcttaggcctcagcgttgtacggcaactcgttgccgaattggggggcaccgtcaacatcaagagctctttgggcgttggcaccctcgttgaggtcttggtcccccttggagactatgatgtgctatccccaactgaacaagcccttgcggatggggatgaattacagctcgatgagaaaacagtgtgcgtcatttctcctgacgcctgcgcggctgtagtcggagcagacttcaatttcggcagcgaagcccgaaaatgcggcgtggacctgctggtgatcggattccagaagtga

SEQ ID NO: 4303 - protein, 594 aa, Myceliophthora thermophilia
MNEIAAAIMPRFENGPSMVSLSSQESTQSGQSLATPQEGASEAPPMTPRDDLRTNPMEEQLLAAIAHSPAERSPSRSASVPSEHSESHGFISSANIKITFFRAAATIRRTMNLDCRMFLDAVPSSYLDRPDQPSLDSRDPPRSPTEGPFCATIVKPVAGHGTDAATHSNFQLPEVSPHRFIQAYPRGHVFTADELGPIDDSYGLGKPFQSRPAADKKSLRLRNDITALFRILPAAKYIILLPLWHFQRECWYTATFGWVEDPIRAVNVGELGLISAFGSSVMAEVSRLETLAASRAKSDFVSSPSHELRSPLHGIMASSELVREGISDRTLLSTLDMPDSCATTLLDTFNNLLDHAVVTHSGLKRGSGALLTSRIRETDLGALVRRSWRSLDRAQGLPNHPVFITIQTEKRQWKLSIDVGVWKRIVMNVFGNAIKYTSAGRVEIVLRVVKRTDRTGRESDYVSFTVEDTGAGMSSDFIKYRLFTPFSQEDSHAPGMGLGLSVVRQLVAELGGTVNIKSSLGVGTLVEVLVPLGDYDVLSPTEQALADGDELQLDEKTVCVISPDACAAVVGADFNFGSEARKCGVDLLVIGFQK

SEQ ID NO: 4304 - DNA, 1956 bp, Myceliophthora thermophilia
atgtctgccgccactttgccgttagaggacctcgagcttgcgctagagctgcaacgcgaggacctagaggggctcaagaaggcaggaaagggaaagggtcgtgagggggagacggacgatttcaacctcgccattcagctgtacgaggctgagctagcgtcatgcatattagttacatctgactattccatgtgcaggagcatcgcccgagccgtcaggctagatgccgacctgattggtcccatcttgctggaagaggagcaagcggctctggaccgagaattcgcccgcacgttgagcccagagggcatgccgacaacgcctggcgggcgcgcttcgatcgtgtcagccttggatgagcagcttctggccaaactcgaggctctatacgtgtctaccgaggaacacccggcggagtcttctatatgggccgccagccgtccggttccatggacaggaggaggcgaaggcgagcaaccgaagattgagtgcataggctgcggtgacaagcgctatcgctcggacgtttctcgctgcccttgttctcacgagtactgccgtgagtgcctggcgagcctttttatggcgtccttgtcggacgaatccttatttcctcctcgctgctgcggccagccgattcccctcgatttttgccgggcctaccttccgacaaatcttgccggagagtttctggtcaagaaggcagagatggagacaccgaacaggacatactgtcatcagccaacatgttccgtattcataccgcagcagttcatcgacggggaagtggcaacgtgtcctcggtgtcagaagacgacgtgtgtgacgtgcaagggtcaatcacacgagggtgactgtccatatgatgtcgctgctcaagagctcctccgcgtcgcggccgagaatggttggcagcggtgctactcttgccgccgggtggttgagctggatcacggatgcaaccacatgacatgtcgctgcggagctcagttctgttatgcctgcggattagtctggaggacgtgcggctgtgagcagtggagtgaagaacgcctccttgctcgtgcagacgccatcgttaatcgtgacgtcgatgccgggcggcttgacgatgtggaacgggcgaaccggctggagagggagcggcagaacttgatgctgaatcatgagtgcgagcacagggcctggaggtcacgcgggggttcgcatcagtgcgaggagtgctacaacttcctccctctcttcatatacgaatatggcatcaccaaccctccaaaccgccgacacgccgcccccgaagagccaggagttctcatcgatttgttggagcgactggttaacaggatggtcgaggtgcattgtcggtcgcgtgcgtggatgaagcaaagcgtagacaaaagtatctcatcagcgtgcaagcccacttcgagtctgtttcaatcctctggtggtggagggctgccgggacgcggcgggccgctgtggggcgcgtttcttgaaggagtggcccacccagcttcccctcatgatccttgcccatctccgctctgccaggcttccatgtcgtgttggccctggcggacccacgtgacatgctgtgcggcagccacccacatcttcccgcagcatgcgccagacctgctcatcttcctcaaggcacaagcatccaaggtgttggatgggagacgcaatccagaagagaacgttgttattgtatttctccaggatgcaaggcacgcagggcggaggcagacccccccagtgggtcctccaacagaaggtcattgcgttccacagttctcggttgtaatgcaacggaagctagaaacgacggccgatcctgctgcatccactcgtgacgcctccaaaactgactccccggtgtattctattcctacccccaatgtttttccttctgaagccgttttcaattttggcaacagcagggatgactga

SEQ ID NO: 4305 - protein, 651 aa, Myceliophthora thermophilia
MSAATLPLEDLELALELQREDLEGLKKAGKGKGREGETDDFNLAIQLYEAELASCILVTSDYSMCRSIARAVRLDADLIGPILLEEEQAALDREFARTLSPEGMPTTPGGRASIVSALDEQLLAKLEALYVSTEEHPAESSIWAASRPVPWTGGGEGEQPKIECIGCGDKRYRSDVSRCPCSHEYCRECLASLFMASLSDESLFPPRCCGQPIPLDFCRAYLPTNLAGEFLVKKAEMETPNRTYCHQPTCSVFIPQQFIDGEVATCPRCQKTTCVTCKGQSHEGDCPYDVAAQELLRVAAENGWQRCYSCRRVVELDHGCNHMTCRCGAQFCYACGLVWRTCGCEQWSEERLLARADAIVNRDVDAGRLDDVERANRLERERQNLMLNHECEHRAWRSRGGSHQCEECYNFLPLFIYEYGITNPPNRRHAAPEEPGVLIDLLERLVNRMVEVHCRSRAWMKQSVDKSISSACKPTSSLFQSSGGGGLPGRGGPLWGAFLEGVAHPASPHDPCPSPLCQASMSCWPWRTHVTCCAAATHIFPQHAPDLLIFLKAQASKVLDGRRNPEENVVIVFLQDARHAGRRQTPPVGPPTEGHCVPQFSVVMQRKLETTADPAASTRDASKTDSPVYSIPTPNVFPSEAVFNFGNSRDD

SEQ ID NO: 4306 - DNA, 513 bp, Myceliophthora thermophilia
atggatgtccacggcccttcccggcgcagcgggatatatcgggaactgcaagggaccattgcaacgtccaggcgccaagaaaggaccttgcggggagcattagcgagccgcgatgctccagactgtcggaaccgctccatgaaggaccttggcctccatttagggcttaccgagccgttggaggctcatggtgctagtcgacctccttcgtggacgtttgaagagattgcgaactcccaaggctcccttttggtcgcttgtggccgtgatgggggcgcctggctccgagaagcggcttttcccacctcgcccgccaccggctctgccgctctttgccggtctcgcttggcaaccaacctgaattcttcgcaggccccggtgcctcgagtgatgtcatttgtctgcctccgaaacccggatcgttctgccggcttttcgtctcaatttatccacggtccaatgcctaaacgaggagcggggcaatggtggaagaaaccaaaagagcaaatttag

SEQ ID NO: 4307 - protein, 170 aa, Myceliophthora thermophilia
MDVHGPSRRSGIYRELQGTIATSRRQERTLRGALASRDAPDCRNRSMKDLGLHLGLTEPLEAHGASRPPSWTFEEIANSQGSLLVACGRDGGAWLREAAFPTSPATGSAALCRSRLATNLNSSQAPVPRVMSFVCLRNPDRSAGFSSQFIHGPMPKRGAGQWWKKPKEQI

SEQ ID NO: 4308 - DNA, 210 bp, Myceliophthora thermophilia
atggcaatggactttgcagcggcccacgccaaacgcggatacgacgctagccaccgtgacatcgaattcaagccaggcgaccgactatcgcctactcctcccggaaccgacctgtacgactacgctataccacctcctaaccctattaaggacagctatactaatagcggtttagaatccggagacgagtacgagctcgaacgtatttaa

SEQ ID NO: 4309 - protein, 69 aa, Myceliophthora thermophilia
MAMDFAAAHAKRGYDASHRDIEFKPGDRLSPTPPGTDLYDYAIPPPNPIKDSYTNSGLESGDEYELERI

SEQ ID NO: 4310 - DNA, 1716 bp, Myceliophthora thermophilia
atgggcgctggcggaggcggcgacgccggcgcgttctacgatgccgcgctcaagaagcggcaggccatgatgggcaagagcggaccctcggcgctgctcaagaacttccgggtcttccgtatcgcagcctttgcctgcatcggcggtgtgctgtacggctacaaccagggcatgttctctggcgtcttggccatgccgtcgttcaacagccacatgggcgagtatacgacgaaccagaccaagaagggatggctcactgccattctcgagctgggcgcctggctggggacgttgctctcgagtttcctcgccgaggtcctgtcgcgcaagtacggagtcctggtggcctgcgccgtcttcatgctcggcgttgtcatccagacgaccgcggtgtctgccgggcacaactccatcctggccggacggttcatcactggtatgggcgttggaagtctggccatgatcatccccatctacaactccgaggttgctccccctgaggtccgcggcgctctggtggcgacccaacagctggccatctgctttggtatcatgatcagcttctggatcgactacggcaccaactacatcggcggaacaggcgaaggacagagcgacgcggcatggctgctccccgtctgcctgcagctcgcgccggccgtcatcctgtttgtcggcatgatcttcatgcccttctccccgcgttggctgatcaaccacggccgggaggaggaggcgcgcaaggtgttgtccgagcttcgcggcatgccccccgaccacgagctcgtcgagatcgagttcctcgagatcaaggcccaatccctgttcgagaagcgctccattgccgagatgttccccgaactgagcgagcggacggcctggaacatcttcaagctccagtttgtcgccatcaagaagctcttccagaccaaggccatgtttaagcgcgtcatcgttgccaccgtgaccatgttcttccagcagtggacgggcatcaacgccgttctgtactatgccccctttatctttcagcagctcggcctcgacctcaacacgacctcgctcctggccacgggcgtggtcggcatcgtcatgttcatcgcgaccatcccgtccgtcctgtgggtcgaccgggccgggcgcaagcccgtgttgaccatcggcgccatcggcatggctacctgccacatcatcatcgcggtgctcgtggccaagaacatcaaccagtgggccgagcagcgggcggccggctgggcggccgtgtgcatggtctggctcttcgtcatccactttggctactcgtggggtccctgcgcctggatcatcgtcgccgagatctggccgctcagcacgcgcccctacggcgtcgccctcggcgcttccagcaactggatgaacaacttcatcgtcggccaggtcacccccgacatgctcgagggcatcccctacggcacctacatcctcttcggcctgttgacctacctgggcgcggctttcatatggttcctggttcccgagacaaagcggctgacactcgaggagatggacgtcctcttcggttccgagggtaccgctgcggccgactacgagcgcatggaagagatcaacaacgagattggcctcaaccagatcctgcgcggcgagggccgtgtcactgctccctctacgtcggatgccgagaagcccaagggtgcggaacagatggagactgtctaa

SEQ ID NO: 4311 - protein, 571 aa, Myceliophthora thermophilia
MGAGGGGDAGAFYDAALKKRQAMMGKSGPSALLKNFRVFRIAAFACIGGVLYGYNQGMFSGVLAMPSFNSHMGEYTTNQTKKGWLTAILELGAWLGTLLSSFLAEVLSRKYGVLVACAVFMLGVVIQTTAVSAGHNSILAGRFITGMGVGSLAMIIPIYNSEVAPPEVRGALVATQQLAICFGIMISFWIDYGTNYIGGTGEGQSDAAWLLPVCLQLAPAVILFVGMIFMPFSPRWLINHGREEEARKVLSELRGMPPDHELVEIEFLEIKAQSLFEKRSIAEMFPELSERTAWNIFKLQFVAIKKLFQTKAMFKRVIVATVTMFFQQWTGINAVLYYAPFIFQQLGLDLNTTSLLATGVVGIVMFIATIPSVLWVDRAGRKPVLTIGAIGMATCHIIIAVLVAKNINQWAEQRAAGWAAVCMVWLFVIHFGYSWGPCAWIIVAEIWPLSTRPYGVALGASSNWMNNFIVGQVTPDMLEGIPYGTYILFGLLTYLGAAFIWFLVPETKRLTLEEMDVLFGSEGTAAADYERMEEINNEIGLNQILRGEGRVTAPSTSDAEKPKGAEQMETV

SEQ ID NO: 4312 - DNA, 3498 bp, Myceliophthora thermophilia
atgccgggcctcgtttccgcgaccggcgttctgggctttctggccgacgaagagccggaactcaaggtttttgcgctcaagacactaaatgatgatatcgacacggtctggactgaggtagcgggggcattgagccaaattgaggcgttgtacgaagacgagagcttcccggaacgccagctcgccgccctagttctcgccaaggtctactttcatttgcaagactacaatgagagcatgacatttgcgcttgccgccggccctctgttcaagctcgacgcacccggcgagttcgaggagaccatcatctcgaaatgcatcgatcagtatattgccgtctcatcgtctcgtcacacgccagcgaagttgtccaaaaacgacatcgaattgccagcccttgctaccacgttcggcagtggctcgctcgatggctcagccttgatctcggccacaacgcccttctcgcagtccacgctgccttccaagtcgctcctctcgcgcaattcagttgacaataccattcttgacccttccttccagccgacaaaggagggccgttctgcctcggtggctcagattaccgaccaatctacgtggacggccctagagagtgtgattgagcgacttttcgagaacgccctggccgagggcaagtaccggcaggtggtcggtatcgccgtagaagcgaaaaatcttgatgtgcttcgcagggttatcaagagggccagtgaggacgggaagcgcgacaagacgaaggcgcaagaaggtgcccagggcccggcggaggacttgatggactatgcccttaccatctgcatggacattgtccaggaacggggattgcgaaccgagatgctgcgcctgattcttgacctcctcaacgacattcccaatccggactactttgccatcgccaaatgcgttgtctatctggactcggacgaagaggcttcatcgcttctcatgcagctaattactaggggcgacaagagtgcgattgcgactgcctatcaaattgcgttcgacctctacgataacggaacgcaagaattcctggctaaggtgatcaagtctctgccctctggagagccgccgaagaagaaagaagcggcgcaagggggcgaaggcgccagggaatcagaccctctcctcgagaaccaggagaactccgaggaagagcttccagaagaagtggcaaaggtctacaggaacgtccggtctatcctggacggcagcatgaccatcaggctgaacctagagttcctctaccgcaataatcacaccgacctgagcatcctcaacagagtacgggacagcctagaggctcgcaactctatcttccacacggctgtcacgttctgcaacgccttcatgaacgctggaacgaccaacgataagtttttccgagacaacctggaatggctgggcaaggctgtcaactggtccaaattcaccgcgaccgctgcgctcggtgtcattcaccgtgggaatatcagccagtcgcgcaagcttctcgaaccctaccttcccaagcaaggtggggtgtcgagcggttccatttttagccaaggcggcgcgctctacgcttatggcctgatccatgcgaaccacggcgccgacgcgcttgaatatctccgaaccatgttcaatgcggcagacgaagaagtcattcagcatggtggcgccctcggtctcggcatcgcggggatggcttgcggcgacgagcagatctacgaagaacttacaaaggtgctcttcgctgactctgctctcaatggcgaggccgtcggcttggccgttggactgatcatgctcgggtccggcaacgcaaaggctcttgagaccatgttcacttacgcgcacgaaacgagccacgaaaagattgtccgtggctgtgctctcggcatggcactcatcatgtacgggcgccaagaaggcgctgatagcatgattgagggtctgctgaacgaccctgatccgacgctgcgctacggcggcatcctcaccgtggctctggcatactgcggcacgggaagcaacaaggccgttcggaaacttctccataccgccgtgagcgatgtcaacgatgatgtccgcagaatcgccgtcatgagccttggctttatcctcttccggaagcctggcagcgtccctcgcatggtcgagctcctggccgagtcgtacaaccctcacgtgcggtatggttccgccatggcgctcggcatcgcgtgtgctggcaccgggttggacgaggccatcgatctgctcgagcccatgatgaaggacccgaccgactttgtccgccagggcgccctcatcgccctttcgatgatcatggttcaacaaaacgaggccatgaaccccaaggtcgccaccatccggaagacactgaagaaggtcgttggcgaccggcacgaggatgccatgaccaagttcggtgccgcgctggctcttggtattctcgatgctggcggccggaactgcaccatcggcctacagactcagacgggtaacctcaacatggcaggcgttgtcggcatggccgtcttcacgcagtactggtattggttcccattcacccacttcctgtcgctcagctttgcgccgacttcgatcattggcctcgaccacgacctcgagatgcccaacatcaagttctactgcgcgactcgccccagcctgttcgactaccccccggagcaggaagtcaaggtggaagaggggcccgccttggtcactacggctatcctctccaccacggctcaagcgaagcgccgcgctcaaaagaaggagcgcgcccagcgtcgcgagagcatggacatcgatacccctactgtcaccaagatcccggcgccttctggtgacaagatggaagtagacgaggagaagaaggccaaggcggacgagcagaaggagaaggagggcgaagctggtgccgacaaggacggctccgccggcccggacgcgaagaagaaagccgagaaggaaaaggttggctacgaaatcgagaacatgtcgcgcgtcctcccaggccagctcaagtacattagcttcccggcaggacgctacaagccggttaagaagcctactggcggtcctatccttctccatgacacgcaacccgatgagcctaagacgctagtcgaggagaagctgaagaaggttgcgacggagcgtgcccccattgccggtgccaccacaggcgccggagctacgcctcgcaacgcggcccagtcgctactgtcgaactggtcctcgcgggcaatgggtggcggaggcggcatgccggagctgaacgagctgctccagcttaccgcccgtggggcagaaggtcgcgcgggccaggtcggtggcggcgcggcagctgacagtggaagcggtgccgcggcagcagcgggcgtgctcacggccgtggatgaggataacgagggagatgaggaggcgccggctccggcggagtttgagtactttacggacgccgacgaggatgaggagtag

SEQ ID NO: 4313 - protein, 1165 aa, Myceliophthora thermophilia
MPGLVSATGVLGFLADEEPELKVFALKTLNDDIDTVWTEVAGALSQIEALYEDESFPERQLAALVLAKVYFHLQDYNESMTFALAAGPLFKLDAPGEFEETIISKCIDQYIAVSSSRHTPAKLSKNDIELPALATTFGSGSLDGSALISATTPFSQSTLPSKSLLSRNSVDNTILDPSFQPTKEGRSASVAQITDQSTWTALESVIERLFENALAEGKYRQVVGIAVEAKNLDVLRRVIKRASEDGKRDKTKAQEGAQGPAEDLMDYALTICMDIVQERGLRTEMLRLILDLLNDIPNPDYFAIAKCVVYLDSDEEASSLLMQLITRGDKSAIATAYQIAFDLYDNGTQEFLAKVIKSLPSGEPPKKKEAAQGGEGARESDPLLENQENSEEELPEEVAKVYRNVRSILDGSMTIRLNLEFLYRNNHTDLSILNRVRDSLEARNSIFHTAVTFCNAFMNAGTTNDKFFRDNLEWLGKAVNWSKFTATAALGVIHRGNISQSRKLLEPYLPKQGGVSSGSIFSQGGALYAYGLIHANHGADALEYLRTMFNAADEEVIQHGGALGLGIAGMACGDEQIYEELTKVLFADSALNGEAVGLAVGLIMLGSGNAKALETMFTYAHETSHEKIVRGCALGMALIMYGRQEGADSMIEGLLNDPDPTLRYGGILTVALAYCGTGSNKAVRKLLHTAVSDVNDDVRRIAVMSLGFILFRKPGSVPRMVELLAESYNPHVRYGSAMALGIACAGTGLDEAIDLLEPMMKDPTDFVRQGALIALSMIMVQQNEAMNPKVATIRKTLKKVVGDRHEDAMTKFGAALALGILDAGGRNCTIGLQTQTGNLNMAGVVGMAVFTQYWYWFPFTHFLSLSFAPTSIIGLDHDLEMPNIKFYCATRPSLFDYPPEQEVKVEEGPALVTTAILSTTAQAKRRAQKKERAQRRESMDIDTPTVTKIPAPSGDKMEVDEEKKAKADEQKEKEGEAGADKDGSAGPDAKKKAEKEKVGYEIENMSRVLPGQLKYISFPAGRYKPVKKPTGGPILLHDTQPDEPKTLVEEKLKKVATERAPIAGATTGAGATPRNAAQSLLSNWSSRAMGGGGGMPELNELLQLTARGAEGRAGQVGGGAAADSGSGAAAAAGVLTAVDEDNEGDEEAPAPAEFEYFTDADEDEE

SEQ ID NO: 4314 - DNA, 258 bp, Myceliophthora thermophilia
atgacgccgacagaaacgaccaaagtcataccgttcttcgcgaactacggatataaagcagaccttaggcaaggaccagaggtcacagtgccaagagcagcagtcaaagtagaacagatgcacgcactatataagaagctcaagaaggaactcgagtttgtcaagaccagaataaagaactactacgataaacacaggctcaagggaccttgcctagagaggggagataaagtctacctgatcatacgaaacttataa

SEQ ID NO: 4315 - protein, 85 aa, Myceliophthora thermophilia
MTPTETTKVIPFFANYGYKADLRQGPEVTVPRAAVKVEQMHALYKKLKKELEFVKTRIKNYYDKHRLKGPCLERGDKVYLIIRNL

SEQ ID NO: 4316 - DNA, 1194 bp, Myceliophthora thermophilia
atggcgccaaagacaccgctaccgcccgtaccgacggtcgcagagaccttgaagcatcctgcctatccgacggcgacatggaacctcgagccggaccgcaagggtctggtgccggtcgccgaaggccgcggcggtcccttcaacatgtcctgggagatccatggcgtcgggccaatcaggcttattctcatcatgggcctcggcggatttaggacggcctggcagcggcagacgctacactttggccacgagcggcgggaccggtactctgtcctgctgatcgacaaccgcggcatgggcgacagcgacaagccgctcatgcgctacagcaccagcgagatggccctcgacatcgtcgaggtgctggccagtccggacgtcggctggctgccctcgtcttacccgctgccgccttcgcctcccgctcccgctcccgctcccgctcccgagcggaccctgcacgtggtcggcatctcgctcggcggcatgatcgcccaggagctcgccgtcgtcctggccgagtacctctcgagcctgtcgctcatctgcaccgccgccgtggtcgagaacacggcctccttcgccgagcacatggcccagcgcgcctccctgatcctgcccaagtcggtcgaccgctccgtcgccgacgccgcccgccgcatcttcgccccgtcctggctcgccctcccggacgacgtccgcctgcccgacccggccacgactcccaagtgcaaacccccccgggccgccgccgccgagggcgggagcgggagcgggagcgggagtggaaacggcggcgagggcgagggcgggggccggtacctcaagttcgagaccaacgcgcagcggttcgtcgcgcaggagctgcacaagcgcctcgacccggccggccgcttcaccctcaagggcttcctgctgcagctgatcgcggccgggtggcaccgcaagacgcccgcccagctggccgccatggcggaccgcgtcggccgcgaccggatcctcgtcatgcacggcaccgaggacggcatgatcagcgtgccgcacggccggaagctgatcgactacgtgcggccggccaagggaatcattgtggaaggcatggggcacgcgcccctggtggagaggtgggaatggttcaaccaagtcatagaggagcagtgtctgctgggagagcgcttggatgggagggcgtaa

SEQ ID NO: 4317 - protein, 397 aa, Myceliophthora thermophilia
MAPKTPLPPVPTVAETLKHPAYPTATWNLEPDRKGLVPVAEGRGGPFNMSWEIHGVGPIRLILIMGLGGFRTAWQRQTLHFGHERRDRYSVLLIDNRGMGDSDKPLMRYSTSEMALDIVEVLASPDVGWLPSSYPLPPSPPAPAPAPAPERTLHVVGISLGGMIAQELAVVLAEYLSSLSLICTAAVVENTASFAEHMAQRASLILPKSVDRSVADAARRIFAPSWLALPDDVRLPDPATTPKCKPPRAAAAEGGSGSGSGSGNGGEGEGGGRYLKFETNAQRFVAQELHKRLDPAGRFTLKGFLLQLIAAGWHRKTPAQLAAMADRVGRDRILVMHGTEDGMISVPHGRKLIDYVRPAKGIIVEGMGHAPLVERWEWFNQVIEEQCLLGERLDGRA

SEQ ID NO: 4318 - DNA, 783 bp, Myceliophthora thermophilia
atgtcgactgacaagatcacctttctgacgaactggctcaggcacgccacgccgtaccacgctccgctgtacctggcccaggccaaaggttacttcaaagatgagggcatcaaggttgccttgctcgagcctaatgaccccagcgatgtgaccgagatcatcggcaccggcaaggtcgacctcggcttcaaggccatgatacacactcttgcggccaaagcccgcaacttcccagtcttgtccatcggcagcctgctggatgagcccttcactggcgtcgtgtacctcaagtcgtcgggcatcacgtccgacttccgcaccctcaagggcaagcggatcggctacgtcggcgagttcggcaagatccagattgacgagctgacgtcgcattacggcatgtcgccggccgactacaccgccgtccgctgcggcatgaacgtgtcaaaggccatcattgagggcaccatcgacgcgggcatcgtcgtagaccgtcaggctgacgccctccttgaagccgtcgcccgtgtacgaggcgtagcggagcgtgtagccggcgacctgcaggcggagcgacaggtcgaagtcctccgacacgtgcgactcggaccagtacttctcgtacccgtcctcgtccgtgtaggcggccgcgtcctggagcgcccgccaccggaggagagcgttgtggccgacgaagggacaagcgtcgcccgacgcgacggcaaaggtgatgcaggagtagatgagacgggtaaaccaagtgacgctggggaggacaccggttag

SEQ ID NO: 4319 - protein, 260 aa, Myceliophthora thermophilia
MSTDKITFLTNWLRHATPYHAPLYLAQAKGYFKDEGIKVALLEPNDPSDVTEIIGTGKVDLGFKAMIHTLAAKARNFPVLSIGSLLDEPFTGVVYLKSSGITSDFRTLKGKRIGYVGEFGKIQIDELTSHYGMSPADYTAVRCGMNVSKAIIEGTIDAGIVVDRQADALLEAVARVRGVAERVAGDLQAERQVEVLRHVRLGPVLLVPVLVRVGGRVLERPPPEESVVADEGTSVARRDGKGDAGVDETGKPSDAGEDTG

SEQ ID NO: 4320 - DNA, 4059 bp, Myceliophthora thermophilia
atggcacacgagggcatgatccattttgtttccacggccaacgccgccatcttcctactctaccttcccttccgatgctgggagttgcacaattcacgccacagatacctcccaggcccgcaggctcgcattaaactggtcagtgaaggtttgaaaccgctgggtttgaacctgctcatgtacctggagcaacgccgggcgaccaaaccctcggactcggcaacgttgtacctgctcgcgtcagtgctatgcgactcggtagctctgacagtgccctctgcagtccgccggcccccacctgctcggtgtttgctgcacaccttgctactggtcctcgagtgcttcctaccgcgggccaaccagccgggtactccccgggagaaccaggcgccggaggacaatggcggcactctgagcaggctcctcttcgcttggatcaacccttttctcctgcgaggatacaggagcctgctcctcagctacgactcgccacccctcccccgagatttgagcgcgaaactattcagacaggctatggttgagtcgtggaaccggcgagcgagacccgagacaaaggcggcattgcccctcgccttgttgaggtgtatccgacggccctttgtagctccgatcatacctcggctctttctgattctcttccgatattcccagccggctttgatccgacggtccattcagttcgtaactgatgacgttccctcagctgctggtgtggaaactcgaggttactggctcgtgttttcggctgtaaccatatatgttggtcttgctgtctcgacggcagcataccaacacaggctgaataagctcagagtggtgaccaagagcgcgctcgtcggtatcattcaccacaaaactatcagcttgcctagtgcgacacatgacaacagcgaagcagttaccctcatgagcactgatgctgatggattggatggggcggccgaaatgttccacgagacatgggctcaaagtctggaggtggtcattggaatctttctattgtctcgagaggtcggctcgatctggcctcttcccctgatccttatattcttgtgctctcgcatgagccgctacgtggccaagcacttagggcctcgccagaatgcctggaataccgtaacgcaacaacgtgtggcagcgacaagctctatgctcagttccatgaaggtcatcaagatgctgggactgcagcactgtatggccagcttcacacgtcgtctgcgcgaggaggagctgaaaacagcatcgagagtcaggtggatcatggtgtattacaatgccagcgctaatctattgggcatattttctcccgcaattaccttgacgctctctgcccttgccgccgcgcgacgtggccttgccctgaacgcggagacggcattcacttcaatggccattttgagcatggtcacgcaccctgccaacatggtcatgaccattgtgccccgcgcagttgcggcattcgcgggacttgagagaatccaggcctatctccttaaaccgcggttgctcgacggaagacagacccgaccgtcggcgggagaaacagctggtttggcgatcaaggtgcacgatgttgtggttggcgaacatcattcgattctgaacggtgtgagcattggggtgaactacggctcgttagtcatcctctcaggcccagttgggtcaggcaagtcgacgctgcttcgggcgatcctgggggagatccgtcctgtccatggttcgattcaggtggcatcacgacggatggcctactgctcccagcagccatggcttcctaacgggagtattaagcaggctatctgcggcatggacgacaaccaagacgatattcaatggtatcagcgtgttctggaagcttgttgtctcagccacgatctcgagcttctacccgatggcgatgagacggagatcggaagtggcggccttaacctctcaggcgggcagagacaaagggtggccctggcgcgtgcattgtttgcccgatgtgacattgccctgctggacgatgttttcagtgctctagatggagacaccgagatgcgaatctttcgaaacttgtttgggccaacaggactcttccgacagttgaacacagcggtagtcctggttacaaattccgcacaattttttccacccgccgacctcatccgggttcttgagggcggtagcataaaaatacaaggctcctgggaagaaataagacacaaggcccactcctcgatatccaagttcagtcttcagcatcagaacgaccgcgtcgttgctcccgccccgctttccaactttacaaagttgaatgctcaacctcaaatcagacaagaagcaaaggctgatctcgtcaggaagacaggggatctggggctctattggtactacttccgctttgttggcctgttcaaccttgctctcctcgccggctgcaccgcatcttactccttcttcatcacccttccgcagcaatggcttaagctgtggacggaatccagcggccagaaccaagtcttctatgtactcggtttcatcctgttgtcactgttatcatggacttccaccaatgggacaatgtggtcggcggtgattcggattgcccctcattctgggctgatgattcaccaacacctcctcactattgtttcgaatgcccctctgtcgttcttttccaaaaacgacaacggctccattctcgcccggttcactcaagatatgcagctcatcgacaagcagcttccttctgcactggccaacttggggaacctgtgtggaagtctggtctggatcatccagaaggtctacctcaggacatcacggcagcttcggtttctggaattggaatctcgtgcagcggtgctatcaagcttcctcgagtcggtggaaggtcttgagacgatacgatcgtttggttggctcagcgaaataactgaccagaacaataagcgattggaggactcacagcgtcctgagtacctcctcatgtgtctccagcgatggctaaatctggttctcgacatgatcgccgctacggtagcgataggcatcattgcagccgccgtcgcccttcgcggacagattcaggccggacaagttggagtggcactcaatatcatgcttgtggccaacacgactttgctacggctgatcgaatcgtggacaagtttagaggtttctctaggtgcgattgcccggttgcaggcgcttgaaacaacgacgccgtctgaattcgacaaaaacgccatctttgagccaccccgtgggtggccgactcgaggacaagtcgagtttaagggtgttaccgcggtatacaacgccgaagccgtcgccttgcggggtgtgaccttgacgatcaacgcaggccagaaaataacgatctgcggcagaactggcagtggcaagagctcctttctcctggcgctcctcaggatgctggatgtgcaatcaggcagtatcgaacttgacggcgtcaacatcgccaaaatcccgcgtgactttctgcggcagcggtgcttcgtgacggtatcacaggacgggttccttctacccagtgaaacacttcgctccaacctcgatccggaacgcttacttggcgacgactatatcatcatcgacactttgaagagggttggtctctggtcacatttctctcccgcgggccagtcttccaaggagtattatcgcggtgatgggcacccgattctagatcagaagttatcgtccttctcagccttctcagctggccaagcccagatcttcaccctctgccggggaattctcaaggccgaagctctacgagccgacggcgggcggcccgtggtacttcttgacgaggtcacatctgccctggactcaagcacggagtgggctgtgcaaagaattttcgaggctgaatttgcagcaaaagggcataccatcatcatggtttcccaccgtctagggcagctatccgagtttatgcgtccgagaacggatcttgttgtccgcatgcgggatgggaggttggagagcgctgtgagcgacttgaaaggagcggcaggagattga

SEQ ID NO: 4321 - protein, 1352 aa, Myceliophthora thermophilia
MAHEGMIHFVSTANAAIFLLYLPFRCWELHNSRHRYLPGPQARIKLVSEGLKPLGLNLLMYLEQRRATKPSDSATLYLLASVLCDSVALTVPSAVRRPPPARCLLHTLLLVLECFLPRANQPGTPRENQAPEDNGGTLSRLLFAWINPFLLRGYRSLLLSYDSPPLPRDLSAKLFRQAMVESWNRRARPETKAALPLALLRCIRRPFVAPIIPRLFLILFRYSQPALIRRSIQFVTDDVPSAAGVETRGYWLVFSAVTIYVGLAVSTAAYQHRLNKLRVVTKSALVGIIHHKTISLPSATHDNSEAVTLMSTDADGLDGAAEMFHETWAQSLEVVIGIFLLSREVGSIWPLPLILIFLCSRMSRYVAKHLGPRQNAWNTVTQQRVAATSSMLSSMKVIKMLGLQHCMASFTRRLREEELKTASRVRWIMVYYNASANLLGIFSPAITLTLSALAAARRGLALNAETAFTSMAILSMVTHPANMVMTIVPRAVAAFAGLERIQAYLLKPRLLDGRQTRPSAGETAGLAIKVHDVVVGEHHSILNGVSIGVNYGSLVILSGPVGSGKSTLLRAILGEIRPVHGSIQVASRRMAYCSQQPWLPNGSIKQAICGMDDNQDDIQWYQRVLEACCLSHDLELLPDGDETEIGSGGLNLSGGQRQRVALARALFARCDIALLDDVFSALDGDTEMRIFRNLFGPTGLFRQLNTAVVLVTNSAQFFPPADLIRVLEGGSIKIQGSWEEIRHKAHSSISKFSLQHQNDRVVAPAPLSNFTKLNAQPQIRQEAKADLVRKTGDLGLYWYYFRFVGLFNLALLAGCTASYSFFITLPQQWLKLWTESSGQNQVFYVLGFILLSLLSWTSTNGTMWSAVIRIAPHSGLMIHQHLLTIVSNAPLSFFSKNDNGSILARFTQDMQLIDKQLPSALANLGNLCGSLVWIIQKVYLRTSRQLRFLELESRAAVLSSFLESVEGLETIRSFGWLSEITDQNNKRLEDSQRPEYLLMCLQRWLNLVLDMIAATVAIGIIAAAVALRGQIQAGQVGVALNIMLVANTTLLRLIESWTSLEVSLGAIARLQALETTTPSEFDKNAIFEPPRGWPTRGQVEFKGVTAVYNAEAVALRGVTLTINAGQKITICGRTGSGKSSFLLALLRMLDVQSGSIELDGVNIAKIPRDFLRQRCFVTVSQDGFLLPSETLRSNLDPERLLGDDYIIIDTLKRVGLWSHFSPAGQSSKEYYRGDGHPILDQKLSSFSAFSAGQAQIFTLCRGILKAEALRADGGRPVVLLDEVTSALDSSTEWAVQRIFEAEFAAKGHTIIMVSHRLGQLSEFMRPRTDLVVRMRDGRLESAVSDLKGAAGD

SEQ ID NO: 4322 - DNA, 342 bp, Myceliophthora thermophilia
atgaccgactttttggagcgccttctgccgccctggaaggacacagtcacaactactatccgcatacccattccgccctctgcgcagaacgaaatggaaggagaaattcttgcgacggctatgaagcactctctttctaaaaaggacgccgacgagggcttcgacctggttgtgcggaagcgtgtcttccacttcgcgacgacggagatcaagacgaagcaatccgtcactctggatcagctatgggccgccgagatggcggccactcggatctccacggcctctgctggatatggggccgtgctgatcggtagcattctcgccacgggcctcgctgtttag

SEQ ID NO: 4323 - protein, 113 aa, Myceliophthora thermophilia
MTDFLERLLPPWKDTVTTTIRIPIPPSAQNEMEGEILATAMKHSLSKKDADEGFDLVVRKRVFHFATTEIKTKQSVTLDQLWAAEMAATRISTASAGYGAVLIGSILATGLAV

SEQ ID NO: 4324 - DNA, 438 bp, Myceliophthora thermophilia
atggcctcctgtatcttctgcaagatcatcaagggcacgtcggcctgctctcagcccaagctcccagtgggcgagatcccgtgcttcaagctcgttgagaccgagaagtcactcgcgttcctcgacatcaacccgctcagtcgggggcatgcccttgtcatccccaaattccacggcgagaagctgaccgacatccccgatgaccacctgaccgatatcctgcccatcgcgaagaagctcgtcaaggcgacgggcgcggaggagtacaacatcctgcagaacaatggaccgggggcgcatcaggtggttgggcatgtgcacttccacatgattcccaagcccaacccgcaggaaggccttggtatcggctggcctcagcaaaagacggatatggaccagctcaaggcgctgtttgaggagattaagtcgaaggtgtaa

SEQ ID NO: 4325 - protein, 145 aa, Myceliophthora thermophilia
MASCIFCKIIKGTSACSQPKLPVGEIPCFKLVETEKSLAFLDINPLSRGHALVIPKFHGEKLTDIPDDHLTDILPIAKKLVKATGAEEYNILQNNGPGAHQVVGHVHFHMIPKPNPQEGLGIGWPQQKTDMDQLKALFEEIKSKV

SEQ ID NO: 4326 - DNA, 2490 bp, Myceliophthora thermophilia
atgttccgccaacgaacaagttcacaaaaaccaggggacgacctgcttgccaacttcaggcagcaatttcctgaagtggcagcggtcggctcaactgcctccacagccggtccggcaaggaccgcaaccgctgggcatgcgcatgctgatgttcccggccctgcgccagaaaggtcccacagcatcagccatgaagccttccgggaccaagacccgaccccaaggggttcgaacgacccctggcgcttcactccgtcattgctagacccggcctccttttcgttcgccaacttcgccaaccaggcgcccggctactatacgcccacttcgggggggacaaataccatctaccatccgcaggctggcgatcttcacacacccacgctggggttggggatgggccttggaaccccgttgtcaatgccgaactctgagggtgcggcgcacgcaggcgctgggccaatggacatgaccggcttccaccaaggcttccacccccaacagttccagcagttcaccacccccttcatccaggcccctccgccgcaatcctcgttcgctccgtcgtcgttcatgcaccacgatactgggtacgagacgatggaccaggggtcgccaatagactcagaccacgccgaggagcggatcggatccatcgatggcaatcttcagagccaatctcccatggtgtctttccaagccaggcagtttgggatgcccatgtcggtaccccttccggcatcggctgaaaagttccgtttccacgcggccctcaacgcgccgaccgccatgatcaagcatgccgacgagattccggttacctatctgaacaagggccaggcttactcgctttccatcgtcgataccacgcctacgctgcccattgccccgggcacgcgattcaggacgttcgtgagggtttcgttcgaggacgagcagcaacggcagaagccaggggtatgctggagcctgtggaaggaaggacgtggaaccaacgaagcccatcaacgaggaggaaaactgcaagcggtcgagtatgttgaggccgggcagcctgcagaaggcgacgacaagaagacgcgcatcgagctcgagacgtcgtcttttgacggattctcggtcatctggactcccggtgtgaacggcgcggtcgagtgcaacattgcggtccgcttcaacttcctctctacggatttcagccattccaagggcgtcaagggcattccggtcaggctctgcgccaagacacagcagctgccggctgatacctcatcgcccggagacagcaccaacgcccccgagatctgttactgcaaggtcaagctgttccgcgaccacggcgcagagcgcaagctctctaatgacgtcgcgcacgtccgcaagaccatcgacaagatcaagcagcagatcgcccaggcagagagcggcatgaaggacttcggcaagcggaagcgagccggcgggtcacagttgaagggccaaaacgggcaacggcccggcaaggcgcacaagcacaaacgcacatggtccatgtcgtctgccagctccggaggcggcggcccgcgcgttacccttgaagaagaccttcacttcaagctccagacccttcaggacatgttcaccagcacgcgtcctgtgagcgtgctatacctgcgcggcgaggagctcgacgacccggacctccacccggtctcccttcccggcgaatcactcgagctcggcaaggtcgagtcccgcgatagcgtcgcctggcgcagcgagcgcggctcaatcacgggctcctccctcgtgtcgccctcgccgagctccctctcactacactcgcaaaactcggcgggcaacaagccccagtggcaggactaccagatcggcggcggcagtggcagcggcgcaacctcctccgagccgtcctcacgcgacctccacaacggccggccgaccaaggtccgccaggtcgacgaggcgggcaacctcacgggctggatcgaagccctgggcgtcgacgccaactaccacccgccggccgaccggcgtcccaagcccgtggcgtgcttctacgtcgcgctccgccgcagctcgcccgaccaggcgggcggtcagccctaccaagaactgcaccgcgccgtctacctgatgcagcgcaccgcgcgcgacctggtcgcccgcctggcagccaagtggcgctttgacgcgtcccgcgtcgtgcgcactgtgcacgtcgtcgaaccccgcgggctggaggtcgaggtggatgacgacgtggtcagggagctgcccgagggtctggacatgaccttggagatcgtcgaggtccctaccgctgccgcgggtggggaagtcgtcaagaaggaatgggacgccatggcagtggatgacgcgcccggggaggcggacctgccctctccggacagttctggtgcgctaggatatgtccagcaccagcagctgcagggtaagacgggggcgatagagttgaagctgaggtattaa

SEQ ID NO: 4327 - protein, 829 aa, Myceliophthora thermophilia
MFRQRTSSQKPGDDLLANFRQQFPEVAAVGSTASTAGPARTATAGHAHADVPGPAPERSHSISHEAFRDQDPTPRGSNDPWRFTPSLLDPASFSFANFANQAPGYYTPTSGGTNTIYHPQAGDLHTPTLGLGMGLGTPLSMPNSEGAAHAGAGPMDMTGFHQGFHPQQFQQFTTPFIQAPPPQSSFAPSSFMHHDTGYETMDQGSPIDSDHAEERIGSIDGNLQSQSPMVSFQARQFGMPMSVPLPASAEKFRFHAALNAPTAMIKHADEIPVTYLNKGQAYSLSIVDTTPTLPIAPGTRFRTFVRVSFEDEQQRQKPGVCWSLWKEGRGTNEAHQRGGKLQAVEYVEAGQPAEGDDKKTRIELETSSFDGFSVIWTPGVNGAVECNIAVRFNFLSTDFSHSKGVKGIPVRLCAKTQQLPADTSSPGDSTNAPEICYCKVKLFRDHGAERKLSNDVAHVRKTIDKIKQQIAQAESGMKDFGKRKRAGGSQLKGQNGQRPGKAHKHKRTWSMSSASSGGGGPRVTLEEDLHFKLQTLQDMFTSTRPVSVLYLRGEELDDPDLHPVSLPGESLELGKVESRDSVAWRSERGSITGSSLVSPSPSSLSLHSQNSAGNKPQWQDYQIGGGSGSGATSSEPSSRDLHNGRPTKVRQVDEAGNLTGWIEALGVDANYHPPADRRPKPVACFYVALRRSSPDQAGGQPYQELHRAVYLMQRTARDLVARLAAKWRFDASRVVRTVHVVEPRGLEVEVDDDVVRELPEGLDMTLEIVEVPTAAAGGEVVKKEWDAMAVDDAPGEADLPSPDSSGALGYVQHQQLQGKTGAIELKLRY

SEQ ID NO: 4328 - DNA, 1071 bp, Myceliophthora thermophilia
atggcgaccaccacgtcgggcctgacgcggcgcagaggcggagggggcggaggaggaggtttcggagacggggaaaccaccggcggcatcggctcgcggaccaattcgtcggccaacgtccgggacacgagcggcgggcccgagacgagctacgagaacggcgagaacggccaccggatcgccttcgacccgcgcgacatcagcgagagcgccgagcgcagcaagcagcccaagctcaccctcatggaggaagtgttgcttctggggctgaaggataagcagggctatctgtccttctggaacgataacatctcgtacgcactgcgcgggtgcatcgtccttgaactcgccttccgcggccgcatagccatgcagaagacgccctcaaggcggagcttcccgctgcccgaccgcatcatcgaggtcatcgacgacaccctgactggcgaggtcttgctggacgaggccctcaagatgatgaagacgagcgagaagatgagcgtcagcagctggatcgacctgatgagcggcgagacatggaacctcatgaagatcggctaccagctcaaacaggtgcgcgagcggttggccaagggcttggtagacaagggcatcttgcggaccgagaagcgcaacttcctcctcttcgacatggcgacgcacccagtggtcgatagcggcgccaaagaggagatccgccggcgcgtccgcaacgtgctgacgcagcgcaccgtcgtgcttaacagctcgcagtggctcccagaaggcctcgagttccgctatctgcgcaccgtggccatggtctgcgccgcctacgcggctaacgtcctcgaaaacgcgctatcgaccctcggccacgaggcccgcgagaaggccttcaaccagaccgacgagctgcttgccgactacagccagtggccttttgggcgcaaggcaaccggtaatgacatcggggaaaacctcccccaggttattggcgaggaagtcagcaaggcgcatgacaaggagcttcagctcgaagtcgtcgccgcctgtctgtgcgtcttcacccgactggattctcttctctaa

SEQ ID NO: 4329 - protein, 356 aa, Myceliophthora thermophilia
MATTTSGLTRRRGGGGGGGGFGDGETTGGIGSRTNSSANVRDTSGGPETSYENGENGHRIAFDPRDISESAERSKQPKLTLMEEVLLLGLKDKQGYLSFWNDNISYALRGCIVLELAFRGRIAMQKTPSRRSFPLPDRIIEVIDDTLTGEVLLDEALKMMKTSEKMSVSSWIDLMSGETWNLMKIGYQLKQVRERLAKGLVDKGILRTEKRNFLLFDMATHPVVDSGAKEEIRRRVRNVLTQRTVVLNSSQWLPEGLEFRYLRTVAMVCAAYAANVLENALSTLGHEAREKAFNQTDELLADYSQWPFGRKATGNDIGENLPQVIGEEVSKAHDKELQLEVVAACLCVFTRLDSLL

SEQ ID NO: 4330 - DNA, 468 bp, Myceliophthora thermophilia
atggtcactgagcactatgtaatccggaaggcgcatggggacgccgagtggggccgagagcggggaatcccggcggaggaccgaagcatttggggaatacacgcgcagccgacctcctacagaccctcgacccgcccgtgcccaggccgagggctgcgagatctgtgggcgcggctgggtccgcctgacgtacaccaccacctgatcccgcgcatggtgtacgacaaggcggtcaagcgcggctggcaccgccgggacgagctgcaggacgtggcctggctgtgcggcgcctgcaccgcttcgtccacaccagttccgcggccacgaggagctcgccagggagtattacacggtcgagcggctgctggcgaccgacgaggtgaggaggtttggcgagtgggtcgggagggtgaggtggaaggcgaggtgacgatggcagagagtgttatctaccttgtttcggagtaa

SEQ ID NO: 4331 - protein, 155 aa, Myceliophthora thermophilia
MVTEHYVIRKAHGDAEWGRERGIPAEDRSIWGIHAQPTSYRPSTRPCPGRGLRDLWARLGPPDVHHHLIPRMVYDKAVKRGWHRRDELQDVAWLCGACTASSTPVPRPRGARQGVLHGRAAAGDRRGEEVWRVGREGEVEGEVTMAESVIYLVSE

SEQ ID NO: 4332 - DNA, 771 bp, Myceliophthora thermophilia
atggcgaccatcacgaccatcatcgccttcgatctctacggcaccatcctgtcgaccgattcgatcgccgccgaactggccgaggttgccggccatgaccgcgcaggagagctagcctcgctctggcgacgctaccagcttgaatacacgtggcgcatcaacagcatgggccactaccgccccttcaccactctcaccctcgcctccctgcggcacgccgtcgccgacctcgacccggccctcgtgtccgtcctcacgccggaccgagaggaccgggtgatgcgggcgtacgacgcgctacgtgtcttccccgaggtgcccgccgccttccggtcgatccgtgatcaggcggagccagcaccagcaccagcaacggcagcggcggcgaagactagggtggaggcgtacgtcttctccaacggcacggccgacatgatatcgtcatccctgtccaacgcgccggacctggccccgcacgccggcgtgctgcgcgggctggtgagcgtggacgaggtgcgggtctacaagccggaccgccgggcgtacgagcacctgctgcggcgggtgggcaaggaggggaggcccgaggaggtgtggctggtgagctcgaacccgttcgacgtcgtgggcgccgtctcggccggcctgcgggccgcctgggtggacagggcgggcagagggtggaccgaccggttgctgttcgagccgaccatcgttgcccggggagttgacgaggcggtgcgggagatcatcagggccgctgccgagtag

SEQ ID NO: 4333 - protein, 256 aa, Myceliophthora thermophilia
MATITTIIAFDLYGTILSTDSIAAELAEVAGHDRAGELASLWRRYQLEYTWRINSMGHYRPFTTLTLASLRHAVADLDPALVSVLTPDREDRVMRAYDALRVFPEVPAAFRSIRDQAEPAPAPATAAAAKTRVEAYVFSNGTADMISSSLSNAPDLAPHAGVLRGLVSVDEVRVYKPDRRAYEHLLRRVGKEGRPEEVWLVSSNPFDVVGAVSAGLRAAWVDRAGRGWTDRLLFEPTIVARGVDEAVREIIRAAAE

SEQ ID NO: 4334 - DNA, 693 bp, Myceliophthora thermophilia
atgcctcccaagaagaccgaaaccaagaccgaaaccaaggccgagggcgctgccgccccgaagcccaagtccggctctcaacacacctaccaggacatgatcattgatgccatcatcgcgctcaaggatcgcaacggttctagccgtcaatccctcaagaagtatgtccgcgccaacaacaagatcaacgccaccgatgccatgttcgactctctcttcaacaacgctttgaagaagggtgtcgagaagggtatctttgagcagccaaagggtccctccggcggcaccaagctcgccaagaaggcccttaagcctgctgcccccaagaaggcggcggcgcccaagaaggcagcggccaagaaggagaccaaggacgcaaaggagcctaaggagaagaaggccgccacgaagaaggctgctcccaagaaggagactgccgctaaggagaccaaggagaccaaggagaagaaggctgctgcccccaagaaggccgctcccaagaaggcctccgcggccaagaaggccgcggctgcccccgctgtcgtcgagaagcccaccgtcctgaccaagaccaagtccggtcgcgtcgcgaagacggcagccaagccagctgcgccgaagaaggccgcacccaagaaggccgcggctaagaagaaggagacgccgaagaaggctgaggccactgaggcttga

SEQ ID NO: 4335 - protein, 230 aa, Myceliophthora thermophilia
MPPKKTETKTETKAEGAAAPKPKSGSQHTYQDMIIDAIIALKDRNGSSRQSLKKYVRANNKINATDAMFDSLFNNALKKGVEKGIFEQPKGPSGGTKLAKKALKPAAPKKAAAPKKAAAKKETKDAKEPKEKKAATKKAAPKKETAAKETKETKEKKAAAPKKAAPKKASAAKKAAAAPAVVEKPTVLTKTKSGRVAKTAAKPAAPKKAAPKKAAAKKKETPKKAEATEA

SEQ ID NO: 4336 - DNA, 3108 bp, Myceliophthora thermophilia
atgttcaccttcagcccgctgcagggtgccttgaccgagtcggcagcatcccagtcgctcttggagctagacggcggtgtcaaagtgctggtagacgttggctgggatgagacctttgatgtcgagaagctgcgcgagctggaaaagcaagtccccacgctctcgttgattctgctcacccatgcgaccatcaaccacctcggcgcatatgcgcactgctgcaagaacttccctctcttcacacgcatcccggtctacgcgacaaggcccgtcatcgatctcggccgcaccctgacccaggacctctacgcgtcgaccccgatggccgcgacgacgataccccagacatcgctcgccgagtcttcctactcgtatgcccaggcgtcgtccgcagaccacaaactcctcctccagcccccgacgcccgacgagattgcccgctacttctccctcatccagccgctcaagtactcccagcctcaccagccgctgccgtcgcccttctcgccgcccctcaacgggctgaccatcaccgcctacaactccggccatacgctgggcgggaccatctggcacatccagcacggtctcgagtccatcgtgtacgccgtcgactggagccaggcccgcgagaatgtcttctccggcgccgcctggctgggaggcggccacggggccgcgggaggagccgaggtcatcgagcagctgcgcaaaccgacggccctggtatgcagcagccggacgcccgagacggcgctcccccgtggccggcgcgacgagcagctgctcgagtcgatcaagctctgcatcgcccggggcggcaccgtgctgatccccgtcgactcgagcgccagggtgctcgagctttcctacctgctggagcacgcctggaggtccgaggtcgccaaggacaacgaggtgttcaagtcgacaaaggtctacctggccggccgcagcgtcggcagcaccatgcggaatgcgaggagcatgttggagtggatggacgacagcatcgtgagggagtttgaagcagtcgccggcgggacccggaccgggaatagcggtggcggcgccggcagcggcgccaagggaaaggaagccggccccttcgatttcaagcacctgagactgctcgagcgaaaggcccaggtcgagcgcgtcttgcagcaggcaacagcaacggatgatgccgagcccagaggcagggtgattctcgcgaccgactcgagcctggaatggggtttctcgaaggacgtcatgcgagccattgccgaggatccgagaaacctcgtcatcctcaccgagaaaccgagtctcaacccgggcaagccgtctattgcccggatgctgtgggagtggtggagggagaggaaggacggcgtggctgtcgaacagacgagcggcggcgacacgttcgagcaagtgtacggaggcggacgggagctggaactgaccgacgctacgcggcaagcgctagagggcaccgagcttgacgtctaccaacagtggctcgcgacgcagcggcagctgcaagcgacattacagaccggcggcgccgcgacgttagaatcagccgccgacgtcgtggacgacgcctcggagaccacgacggagtccgaggagtccgagacggagcagcaagggaaagccctaaacgtgtccacgacgatcggtcaggcgagccgcaagaaggtgctgctcaaagacgaggacctgggcatcaccatcttgttcaagaagaagggcgtctacgatttcgacgtgaggggcaagaaaggaagggagcgcatgttccccatcgtagtgcgacggaagcggaacgacgaatttggcgagctcatccggcccgaggattacctccgcgcggaggagcgggaagatgcagaggcacaagacgagaggcaggatgggcagagggaggagcagggccagggcctcggcaagaagcgaaagttcgacgacgtgggcgcggccaagggaggagcctccggagccaacaagcgccctcagcccaagcgcgccgtctcggacgagcccgaggccggcgcgctattggacggccatgctggcgacgagctggacgagctcgaagacgaagaagaggaggcggtggttgggccggccaagctggtggtcaagtcgcaaaccgtctcggtcaagctccgcatcgcctttgtcgactttagcggcctgcacgacaagcgcagcctcaacatgctgatcccgctgatccaaccgcgcaagctgatcctggttgcgggcggcgaagaggagacgcacgcgctcgccgccgactgccggaagctgctcagcgcgcagctcacgtccgagtcgtcctcccaagccgcgatcgacgtcttcaccccggccgtcggcgccaccgtggacgcctcggtcgacaccaatgcctgggtggtcaagctcgccgatcccttcgtcaagcggctcaagtggcagaacgtacgcgggctaggtatcgtcacggtaacagggcttctgttgcctggcggagagatggccgtccaagacggtgcggccgcggaggccggtagttctaataataataagcacggcaacgagcaggaagaacaggagcaagacgggtccaacaagcgccaaaagctcgacggcactcccacgcccggcccggccgagccggacgggaccgtcaccaccaccaacaccaccaccaacaaaaacaacaacaacaacacttccaccagcgcatctactctggctacgacggacaaaccggcgacgctcccgacgctcgacgtcctcccgccggccctggcgtcggcagtccgctcggccgcgcagcccctccacgtgggcgacctgcggctggccgacctccggcgggggatgctggcgtccgggcacaaggccgagttccgcggggagggcacgctgctgatcgacggcatcgtggcggtgcgcaagacggcgaccgggcggatcgagatcgagagcgtcggcctgccgctcgcggccgacgccggttccggttccggttcgggggccgccgccgccctggccgggctgggcacgttttacgaggtgcggaggaagatttacgaggggctggcggttgtcgctggggcgtga

SEQ ID NO: 4337 - protein, 1035 aa, Myceliophthora thermophilia
MFTFSPLQGALTESAASQSLLELDGGVKVLVDVGWDETFDVEKLRELEKQVPTLSLILLTHATINHLGAYAHCCKNFPLFTRIPVYATRPVIDLGRTLTQDLYASTPMAATTIPQTSLAESSYSYAQASSADHKLLLQPPTPDEIARYFSLIQPLKYSQPHQPLPSPFSPPLNGLTITAYNSGHTLGGTIWHIQHGLESIVYAVDWSQARENVFSGAAWLGGGHGAAGGAEVIEQLRKPTALVCSSRTPETALPRGRRDEQLLESIKLCIARGGTVLIPVDSSARVLELSYLLEHAWRSEVAKDNEVFKSTKVYLAGRSVGSTMRNARSMLEWMDDSIVREFEAVAGGTRTGNSGGGAGSGAKGKEAGPFDFKHLRLLERKAQVERVLQQATATDDAEPRGRVILATDSSLEWGFSKDVMRAIAEDPRNLVILTEKPSLNPGKPSIARMLWEWWRERKDGVAVEQTSGGDTFEQVYGGGRELELTDATRQALEGTELDVYQQWLATQRQLQATLQTGGAATLESAADVVDDASETTTESEESETEQQGKALNVSTTIGQASRKKVLLKDEDLGITILFKKKGVYDFDVRGKKGRERMFPIVVRRKRNDEFGELIRPEDYLRAEEREDAEAQDERQDGQREEQGQGLGKKRKFDDVGAAKGGASGANKRPQPKRAVSDEPEAGALLDGHAGDELDELEDEEEEAVVGPAKLVVKSQTVSVKLRIAFVDFSGLHDKRSLNMLIPLIQPRKLILVAGGEEETHALAADCRKLLSAQLTSESSSQAAIDVFTPAVGATVDASVDTNAWVVKLADPFVKRLKWQNVRGLGIVTVTGLLLPGGEMAVQDGAAAEAGSSNNNKHGNEQEEQEQDGSNKRQKLDGTPTPGPAEPDGTVTTTNTTTNKNNNNNTSTSASTLATTDKPATLPTLDVLPPALASAVRSAAQPLHVGDLRLADLRRGMLASGHKAEFRGEGTLLIDGIVAVRKTATGRIEIESVGLPLAADAGSGSGSGAAAALAGLGTFYEVRRKIYEGLAVVAGA

SEQ ID NO: 4338 - DNA, 888 bp, Myceliophthora thermophilia
atggaacccgctctgcagagcccgcccttcactcagctcgtcgtcaaggcgatgcggtcgctctaccccgaggagcttgccgaccgggcgtgggacaacgttggcctgctgcaggagaacatcgccctgccctccggtgctgttccttcccgggtgctcctcaccaacgacctgaccctccgcgtcgccgaggaggccatcaagaagcaggtctctgttattgtgagctaccaccccttcatattccgtggcttgaagtctatcacgctcggcgacccccaccagcgcattgttttgcgcctggcccagcacaacattgccgtctacagcccgcacacggccgtcgatgccgtgctgggcggcgtcaacgactggctggccagcatcctcgacaaggtccccggcggcaccagcgacgtgactgtcgtccagcccgcccggggcgcgaccgcgccctccatcccgccggggttcgacggcgccggctacgggcggctggtgcggctgcgcgagccgacggacctggagagcatcctgcgggcgtacgccgtggccctgcgcatgcggcatgtcatggtgtcgcgggttgctccggcggcacccatccgctccgtcgccgtctgtgccggctccgggttcgacgtgctcaaggacgccgacgccgacctgatcgtcacgggcgagatgacgcaccacaacgcgctgcgcctcaagatgctcggcaagtccgtactgaccgtcttccacagcaactccgagcgcggcttcgtcagggaggtgctgcagcccaagctggagagggcgctgagggaggaggacgcggtcgccgaggtgctggtgagcgaggaggacgaggatccctttgagatctgggaggccaaggagtag

SEQ ID NO: 4339 - protein, 295 aa, Myceliophthora thermophilia
MEPALQSPPFTQLVVKAMRSLYPEELADRAWDNVGLLQENIALPSGAVPSRVLLTNDLTLRVAEEAIKKQVSVIVSYHPFIFRGLKSITLGDPHQRIVLRLAQHNIAVYSPHTAVDAVLGGVNDWLASILDKVPGGTSDVTVVQPARGATAPSIPPGFDGAGYGRLVRLREPTDLESILRAYAVALRMRHVMVSRVAPAAPIRSVAVCAGSGFDVLKDADADLIVTGEMTHHNALRLKMLGKSVLTVFHSNSERGFVREVLQPKLERALREEDAVAEVLVSEEDEDPFEIWEAKE

SEQ ID NO: 4340 - DNA, 507 bp, Myceliophthora thermophilia
atgctggctcaccatgtccttcagtcgcccgctaacttggtgagcaggtggccgtggaacgcatggaccatcatccctggttctcgccgatttgtccaccgagctcttgatgcaaccttcgatcaggagcaactggctgaggcaaggaaatggcaccagtcgttccagctcagcagcctgcccgagggcaacacatccttttcacgatctagtggccctggtgggcagcatgtaaacaagtttgtaccaaagcagtctatcctagcacgtgactgcctcacgatacaggctcagacccatagaagccgcagtgcgaatgctgatgaaaaccgccggaaactgtttgaggagctccaagagttgtatcgcaagacggtgcctggtgagagcagcccagagacggccaaaaaatatgaagcactaaagaagagcgccaacgaggcccgagtgaaggcgaagaagatgcaaaagtcaaagaaagcattccgaagaggctttgatgattga

SEQ ID NO: 4341 - protein, 168 aa, Myceliophthora thermophilia
MLAHHVLQSPANLVSRWPWNAWTIIPGSRRFVHRALDATFDQEQLAEARKWHQSFQLSSLPEGNTSFSRSSGPGGQHVNKFVPKQSILARDCLTIQAQTHRSRSANADENRRKLFEELQELYRKTVPGESSPETAKKYEALKKSANEARVKAKKMQKSKKAFRRGFDD

SEQ ID NO: 4342 - DNA, 1419 bp, Myceliophthora thermophilia
atggtcacggagggccttccagtcccttgcagcatctgtgacgaggctcctcccggtcctgcctcttcgcgcgacaagtctgacccaaaagccccaagttcgggcgaatcttcacatgtagccgccatcacggaagccctccgccgcatcaacttctccgaagctcagcggagctcgtctgagcctgtcacggaacaggaagcccagtcccgccgcgcctccatacggcaggcggctcgggcagctgctgcctcaactaccggctctgccatcgagacccctcctcagagcccgtgtctcgccccaggccctggagcgcagcagcagaaaccgcgacaggattctggcttccgcagaacctacgacgaatatgtgacgcggcgcgccggtccatgtgacaactgcgccctgactttacctaagcgacaggaaaatggcaaggacgtaagcacggggtcgcggcctgaccgaggtcctaccctgaggacgcgagctccatatgcgcgagtatttacaggagtcgataaccatatgtcaccgccgacgtcccggtcatcctcgtcggccccgtctgaagacgagtccggcaaccagcaacgtccaccatcccaccgtcgaaccgggactggcctctcggtgacctctcgttccagcggcacctctgacagcgcgagtgccaactcgcacatgcactttctcgactacacgtcgactcacgagccccttgcgcccgaatccttctcccttgttcgcgcatcgtgtttgcgcacgctgtcattggagactctcccccgcgcgccagcgacaagccccgctgccgccggagctaccatgcccaccccaagcggctcgccaaaaagcccggcctatgtcacgactcacagcatcggctcggccgcgtcaggtggttcaatcttcttcggcgaccgaaaggtcggctataccacagcctacatcttccgagttcccgacgtccatgctcgcgggcacaaacgcgtctacgccttcttggcgcttagcacgcacccggagcccactgccgtcaagacttttacctttctttcttccgcctttcgggacatggcttcttggatccaggaactcgcagaggcagaagccgagcgcgcccttgccgagtcgaccggctcgtcaggaaacagcccggtcgcccccggcccgggatacgggagcttccactctgagccggtcgcgccacccgtctctgggggtaacagtagcttcctgacgggaggcattggcggcctgtcgcggcgaatgggtggcggctttggaggctccggggttgctctcaaacagcgcggactggcggagctagtcgggctgcccgacttcttcatcgagctgcatgccaagtttgtccggttgttactcgagattggagttatggttgggtcgtga

SEQ ID NO: 4343 - protein, 472 aa, Myceliophthora thermophilia
MVTEGLPVPCSICDEAPPGPASSRDKSDPKAPSSGESSHVAAITEALRRINFSEAQRSSSEPVTEQEAQSRRASIRQAARAAAASTTGSAIETPPQSPCLAPGPGAQQQKPRQDSGFRRTYDEYVTRRAGPCDNCALTLPKRQENGKDVSTGSRPDRGPTLRTRAPYARVFTGVDNHMSPPTSRSSSSAPSEDESGNQQRPPSHRRTGTGLSVTSRSSGTSDSASANSHMHFLDYTSTHEPLAPESFSLVRASCLRTLSLETLPRAPATSPAAAGATMPTPSGSPKSPAYVTTHSIGSAASGGSIFFGDRKVGYTTAYIFRVPDVHARGHKRVYAFLALSTHPEPTAVKTFTFLSSAFRDMASWIQELAEAEAERALAESTGSSGNSPVAPGPGYGSFHSEPVAPPVSGGNSSFLTGGIGGLSRRMGGGFGGSGVALKQRGLAELVGLPDFFIELHAKFVRLLLEIGVMVGS

SEQ ID NO: 4344 - DNA, 2154 bp, Myceliophthora thermophilia
atgccagataatgatggtctgatgcgcgtgttttggccggccgatctgccgcggtcggacctgaagggcgtggtagtggggtggaggaactcggctctggacgtatttgtgctggccatcctggaagaggtcgagcttcggaatgtcgaattcgccctcaagattggcacgctcctccgcaacgctccccatcccgtaagccgcatctacgagctgtgcggccagacatcgatatgcgtcctcggcctgtccaacaccccagactcggtcgagattgatccgtcatggatacgcgtcacggtcgggcccaagcgccgtgtccctgccatcacatgtccgcgagcctcgagcattcagctgatcctctttgagagaccgaatcccactagaatgcaatatatttccctaaacccaatcgagttggctcttgacgacaagcacgatagtttccggcaagatgtgtctgatggaattgaagacgatgacgagaaggaggagcgcaggaagaaggagcaacagagacagctcgtcgagaagctgaagcagcattcaatctttaagcgtgtgccttccgagaaagaaaaggcactcgccaagattgtgaaccagatcaactggtcatgggagctcgagaagctgctccagaagaacgtttctcgcattggcacgcgccctaagcggagtcttagtgtctccgagagggttgttgagtcagcaacgacggcgcgcgacatgatggtggtgtggatgtgggatctttttaccgtctacgtttggcctgtcatcaaacgggtctttgtcatggggctattggcccatcggatcgccgccgaaatgctcttgcggatcctggaatggcgggcgcagccaaggtacgccgccctgaaggacatctctgccaccgctcagcaggtcgagattcgtctgcagcagttctgctactggccgatgcagtatgtcactcttcggttgaggaagaacgactgggagagcgtgacaaccagccaccccgactacatccgcttttataacagcctctggcttgtggccaacgatgtgatcatcggcatcgctctggggtcttacatcattgataacgccggctgggttgctgaggaggtcaaccagctcctcagtcagtacacggtggacgcgctgcagagcagcatctcctggctcatgggatggcccgccgggttgaagctgaacaatgagctaggggcattcctcggcgacttgtttctatgggtcattgattattggtcaagcttcatcgaggctcttcgcccatatctgcctcgcatcatctggttcataggcttctcgagctttgccggagcaagcatgccgatagccttgttttcggaccttctctccatcctgacggtgcacatctactctttttacctagcctcggcccgaatctaccactggcagctgaatatcctgatatcgctgttccacctgttcaggggcaagaagcacaacgtcctcagaaatcggatcgactcgtgcgattacgatcttgaccagctgctcgttggcaccatcctcttcactcttctcttctttttgctaccgactgtggtggtgttttaccttaattttgctatcgcacgcatggtgatcatctcgctcaaggccgtcttcgacacgatgctgtcttgcttgaatcacttccctcttttcgcgctcatgcttcggatcaaggatcctgggaggcttcctggcgggatccggtttgagcttcgagatacccaagacttcagatcacccattactattaactcgcccacacaaaagctgccttcgacttcagtaatatacctaaaatccgttcccctgaaattcaaggccatgttccaccaatactttcaaatgggacagcggatccgcaaacactatctctcgccgcgggtgttgctctgtcttctcaccggaaagtttgtcccgccgctgaaccgcaagaacctgtacagcctccagtacagcatgctaccggcgcggagagcgggtgttatggagatgtggaacgcggtcaattcgctgccggagtccaagaagcggggggcgccggtgcatgtgccaatcctggcgaacgggaaaacgttccccagcaattatggcggggggaggtcacgaggttatgggtag

SEQ ID NO: 4345 - protein, 717 aa, Myceliophthora thermophilia
MPDNDGLMRVFWPADLPRSDLKGVVVGWRNSALDVFVLAILEEVELRNVEFALKIGTLLRNAPHPVSRIYELCGQTSICVLGLSNTPDSVEIDPSWIRVTVGPKRRVPAITCPRASSIQLILFERPNPTRMQYISLNPIELALDDKHDSFRQDVSDGIEDDDEKEERRKKEQQRQLVEKLKQHSIFKRVPSEKEKALAKIVNQINWSWELEKLLQKNVSRIGTRPKRSLSVSERVVESATTARDMMVVWMWDLFTVYVWPVIKRVFVMGLLAHRIAAEMLLRILEWRAQPRYAALKDISATAQQVEIRLQQFCYWPMQYVTLRLRKNDWESVTTSHPDYIRFYNSLWLVANDVIIGIALGSYIIDNAGWVAEEVNQLLSQYTVDALQSSISWLMGWPAGLKLNNELGAFLGDLFLWVIDYWSSFIEALRPYLPRIIWFIGFSSFAGASMPIALFSDLLSILTVHIYSFYLASARIYHWQLNILISLFHLFRGKKHNVLRNRIDSCDYDLDQLLVGTILFTLLFFLLPTVVVFYLNFAIARMVIISLKAVFDTMLSCLNHFPLFALMLRIKDPGRLPGGIRFELRDTQDFRSPITINSPTQKLPSTSVIYLKSVPLKFKAMFHQYFQMGQRIRKHYLSPRVLLCLLTGKFVPPLNRKNLYSLQYSMLPARRAGVMEMWNAVNSLPESKKRGAPVHVPILANGKTFPSNYGGGRSRGYG

SEQ ID NO: 4346 - DNA, 1803 bp, Myceliophthora thermophilia
atgcccggcaaaacacctgacaaagagcccgtcgagaacggcggttaccgcgggggcaaggacctcaagcccaagggcaagaaggccagcaagaaggaaggtgacgacgagatgaccgtggtggtgcctccgtcaaaatcatccaagcagtcctcggtcccgccgccgaacgacgccgaaggcgacgtggccatggacgacgcggagaagactgccgaaggcgaggccaaggtcgaccccgttgcccagaccatcaacgacatcaagagcaatttcgccctcctagaccgtgccgtcgcccttttcgacgcccggttctccctgcgggccttgcggtccatctcgtcgatcaggaagcgcctcacgcccgatatcctcgcccaggccatctccgagacttacgcctcgtcatcggcgagcgcaaatgtcgcgaggcagatgttgctggccatcggccggtcggacgtgcccctcggtcagcagctcggaccggacatggaggtcgacagcgagccgaagccgtctagcaagaatggcgcgaagaaggaggccaaggaggtgattcccgaggtggatgtcttcctcggtattctcacacaggttctcctgcacgacagcaaacagcaccagcaaggcttcgagttctctcaattcctggttgaccagatccggtccctcaaccgccgcactctcgatagtctcgccgcgaaggtctacttctactactcgttgtttgctgagcagattgctccgctgccgccgtctcttcagtcgccaatcgtgtcgattcgacctactcttctggctgctctccggacagctgtgctgcgcaaagacgtcgacacacaagccacggtcatcgttctcctacttcgaaactacctcctcacgtcgcacatctcgcaagccgacctcctggtttcgcacacgcagtttcccgagaatgccgcgaacaaccaggttgcccgtttcctctactacctcggccgcacgcgtgctattcagctccgctacactgaagcccacgagcacttgacggccgcaacgcggaaggccccttcgagcgcctgcgccctcggtttcagcataaccgctaccaagctgctgctcgtcgtagagctgctgatgggcgacattcccgaccgggcaacctttcgccagccgaacatggagacggccctgcgcccctacttcctgctcgttcaggccgtccgcgtcggcaacctgggggattttgagacgatcattgccgagcacgccgatgcattccgccgcgacggtacctacacgctgattctacgcctccgccaaaacgtgattaagacgggcattcgcatgatgagcctcagctacagccgcatctcgctgcgcgacatctgcatccgcctgcatctgggctccgaggagagcgcagagtacatcgtggccaaggcgatccgcgacggcgtcatcgaagcgacgctcgaccgtgagcgggggttcatgaagagcaaagaggtcggcgacgtgtacgccacgcgggagccgggcgaggcgttccacgaccgcatccgcgcgtgtctggcgttgcacgacgagagcgtcaagtttcttaccccgctacacgtcatcctatatcggtcacgccttactaacgcggcatctttttcactcttccaggccatgcgattccccatgaaccaacatcgccttgagcttaagaatgcgcaggaggcccgtgagcgcgaacgtgagatggccaaggagattcaggaaggtgatctggacgaggacgacctcggcggcgagttcgagggcatgtaa

SEQ ID NO: 4347 - protein, 600 aa, Myceliophthora thermophilia
MPGKTPDKEPVENGGYRGGKDLKPKGKKASKKEGDDEMTVVVPPSKSSKQSSVPPPNDAEGDVAMDDAEKTAEGEAKVDPVAQTINDIKSNFALLDRAVALFDARFSLRALRSISSIRKRLTPDILAQAISETYASSSASANVARQMLLAIGRSDVPLGQQLGPDMEVDSEPKPSSKNGAKKEAKEVIPEVDVFLGILTQVLLHDSKQHQQGFEFSQFLVDQIRSLNRRTLDSLAAKVYFYYSLFAEQIAPLPPSLQSPIVSIRPTLLAALRTAVLRKDVDTQATVIVLLLRNYLLTSHISQADLLVSHTQFPENAANNQVARFLYYLGRTRAIQLRYTEAHEHLTAATRKAPSSACALGFSITATKLLLVVELLMGDIPDRATFRQPNMETALRPYFLLVQAVRVGNLGDFETIIAEHADAFRRDGTYTLILRLRQNVIKTGIRMMSLSYSRISLRDICIRLHLGSEESAEYIVAKAIRDGVIEATLDRERGFMKSKEVGDVYATREPGEAFHDRIRACLALHDESVKFLTPLHVILYRSRLTNAASFSLFQAMRFPMNQHRLELKNAQEAREREREMAKEIQEGDLDEDDLGGEFEGM

SEQ ID NO: 4348 - DNA, 4926 bp, Myceliophthora thermophilia
atgtatcaaaatggccaacgggacacccgtcccttccaggtgccccctccgcctccgcccatgtcgccgccgccgcccgtcggaatcagcaacatgatggccatcccccctccgccccctcggtacccaagtgcccccacgaccggcggcaatgtgttactcccaccgcccccggggccaccgccaaatactacatttccgtcgagcgccatcggaccgcccagcgccttgggcaacgcgccatggcacgggcagtggggtcgcgcctacgacgggcggacggccttcaacgtcccccctcccccgccggtcgtcggcaacaccgggctgcaggcctataacccaatgtctcacgcgcaaacgcatgcgcaggccatcgctgccgccaattccacggcgatgtcgtctggccagaccaatcttacggtgcctcccccaccgcctccgagcgagcagatgagtgcgacatacattccgacaaaagatacctacggggagggcgtgggcattccggggctgtggatccccgacgacggcacccactcgggccagaccgggatggactcggccgctgcgacaccgttggaggagacgtcgggccgtgacgggctgtatgctgcggccatgggtgcgaaagcgcggcccaataccagcggcgggacatcgtcagttccggccgagctcgcagctcagtggccgctggaaagagtcctggcatggctacgggcaaacaatttctccaaagactggcaggagaccttcgagctcctcgatatccacggcgcgaagtttctggagctcgggagtagccatggcggtcgcggaaactttggcatgatgcaccagcaagtgtacccgatgctggccagggtgtgcccgaagaatgggggcgtatgggaccagcctagggagagagaagagggtaagagaatgcggcggctgatccggagcgtcgtcacgggtcgtccgccagatccgtcaatggtgatggccagccacgctcgcaaagcgtcctctagtgccgtgggcgtgcctagtaccgcgaacgagtcggccgagtccccaaacactccgatcaaggccccaggtcccggcttcagcggtaggagattctcgcagtcgcggtcagcaaccatgcctacgtccaacaacaccatgagctcggactcatcgaaccacaggagcctcatgaagaacatcgataccgcgattgcccgccgtcatagtccgaacccgagcgagtccggcgaggtcggctccctccgcgagtctaacctgctgggaagggacagccccggtggcagccccgttcctcagtccggcctgctccctccttcttccaccgcagggaacgtctccgcctccccccatagaagcagcttcggccaccgttcgcgcaacagcactgactcgatatcctcaaacgccgcaatctacggttctggggtcccgcccgatgcggcagcgttgctcaagaacggggttagccttggtgacctggtgaacgcgccccgcgggtccgacgaacacggtcagcggtccggccaagatggcaacagacactcgccgcaggataccggtgaccgaagcgcagggacagatcctccgggcagcgccaaaggcagctcgttcttttcgtcgatatttaagggcctgaagaagcctgacgaccatgactcgccaaccagcccgagtgtctgcaaatactgccgccatagtaacgcgggcgagaactcgcaggaacgaccggcctcaaagcgggctggcagcgggcgcgtcctcatacttgcaactgccgattgctggaattaccgtatggtagacgtcactgatgttgggacgccctccgagttgcgacaacttatttgtatcaacctgggccttccgagcagcgacggtgctcaaatctatctgacagagctgggaagattcgagcatgacgaagaaccacttgatgatgcgaagctactaagcaccaaaacccatgttggggattcggtcgggtcgttgaaattctttgtccgcccgagcatgttccagaatgggagtcctgcgacaacatcgtttgggaatgggcctgtcgctgtggaggaaggggatgtcaatgcaaaggacgggcgacagcggtccggttcctccgcggccacctcgaaacaagaaccgctcgaaggcagggagcgagacgacaagatgttgacagccgaggccatccaatacagggcggaacagctccggaagcaggaggagtatctcgcgaagcgtaggcaaatgattgacgccaaggagagcagcccgtctgcggaaacgccctacggcattgtaggcaggaccgtgaactttgacgtccccagagtatcgccgtacgaggatcggaaggtggacaccttgttcccgcagcgcaaggccccggcgcccccggagaacccgtcggctacgcttctccgggcagaatcgcggaggaagaaccacggcacacgcttgtcgcaagatagtaatacgagcggcggccgtccgaaacgcgcgtcgtccgacttgcgcgaggaggtcgcattcgagaagcagaggaaacgaccaggcatgccaaatccagaggacggtattcacggtctgctggtaggcatgggggagcggatggctggtatcggacgccccaccccgagcggtcacagagggttgtcgccacaccgggtgtcgtcgatgccggtgacaaacaccgaagccaatgctcaaggcaagagtagtcccaagaccggacccgttccggggtcaccgggctctaccacctggagtgctaagaatgtgccgttcctggttccggactactcgccgtaccccggtcctgacaaccggggtttcgccggagcggttccaggccctgaccaattccgcggagggacaggtgatgctaagattcatcgatcagcacgtgttccatcgccaggagatgtcagcccaagctctcgcgagccaagccatgccctcgcgaccacaaccagcgagaagcgcaagtcgcacgggcccgacacggacttccaaggcaacgacgtcaggttctcgcaagcctcgaccctccacgagaacagcaacgaaaaccggaacgcggccggcgacgactccggagatgactccgacgacggtttgtttgctgttcccctctcggcacgcaataacgctacgtcccggaagacgggagcatccgcggaaggcggcgagtccgacggcagcggtaaacggccaagtctgcgggtgaacacgaaacgctctcggaaggccgtatcggtcgccttccagtccccgcagtccagtggcgacagcaaaacgccggccgacggtgaagaagacggagcaaacggccggtcgtcgcagattgatgaccccgaagtgaagctgagcaggcgcaagtcgttcatcgagaaggacgtttgggccaaccgcccgcctaccgatgcacttatcaacaatctcgaggacttcttccccaatgttgacgttgaccagccagttctcgaggacggggaggggccttcacccatcgacgaggcagacgagagcgagcagcaaaacgcgggagcgtcctcttctgttccgcctatccctccgctgcccgctggcctggcctccggggccggccgagctggttccacctacaacgagagcgatacgcttgggtccgatgagtcaaccctcaaggcgctcgactcacgacccacgtcgatgcagacgctggcgggtcggagcgtgcgccgttctggtgggctaggacgcatgaagtcgatcagggaagttgctcgcggtgcgcacgaggcaagcaagcggtacacgcaggcttcgggaccgctgaactcccgggccgggacggggcctggtgataggaacaccaacctgatgcggcgcaagagcaccaagatgttcaacgccaatatcgtgcagatccagcccgagcgcgggtcgctcaacatggccctgagtcagagcacgatcccgcaagacaacttaccgacgcagcagggcaaccgtgacaacattcccaagcggcagacgacgttccgctggttcaagggccagctcatcggcaagggcacgttcgggcgggtctacctgggcatgaacgccacgacaggcgagttcctggcggtcaaggaggtcgaagtgaacccgaaggcggcgcagggtgaccagaagaagatgcaggagctggtggcggcgctgaaccgcgagatcgatacgatgcagcacctcgaccacgtcaacattgtgcagtacctcggctgcgagcgcaaggagcgcagcatttccatcttcctcgagtacatatcgggcggctcgattggctcgtgcctgcggaagcacggcaagttcgaggagcccgtggtcgcctcgctgacgcggcagaccctgtccgggctggcgtacctgcacagagagggcatcctgcaccgcgacctgaaggcggataatatcctgctggacctggacggcacgtgcaagatcagcgactttggcatcagcaagaagacggacaacatctacggcaatgacaagacgaactcgatgcaggggtcggtgttctggatggcgcccgaggtggtgcggtcgcagggggaagggtacagcgccaaggtggacatctggtcaaccgggtgcgtggtgctcgagatgtttgccgggcgccggccgtggagcaaggacgaggcggtcggtgctatctacaagattgccaacggagagacgccgccgattccggacgacattcgcgaggagatcagtccgattgcgatcgccttcatgctggactgctttaccgtggatcctacggaccgcccgactgccgacgtgcttctctcacagcatccgttctgcgagcacgatcccaactacagtttctacgatacggagctctacgccaagatcaggcatgccttgtag

SEQ ID NO: 4349 - protein, 1641 aa, Myceliophthora thermophilia
MYQNGQRDTRPFQVPPPPPPMSPPPPVGISNMMAIPPPPPRYPSAPTTGGNVLLPPPPGPPPNTTFPSSAIGPPSALGNAPWHGQWGRAYDGRTAFNVPPPPPVVGNTGLQAYNPMSHAQTHAQAIAAANSTAMSSGQTNLTVPPPPPPSEQMSATYIPTKDTYGEGVGIPGLWIPDDGTHSGQTGMDSAAATPLEETSGRDGLYAAAMGAKARPNTSGGTSSVPAELAAQWPLERVLAWLRANNFSKDWQETFELLDIHGAKFLELGSSHGGRGNFGMMHQQVYPMLARVCPKNGGVWDQPREREEGKRMRRLIRSVVTGRPPDPSMVMASHARKASSSAVGVPSTANESAESPNTPIKAPGPGFSGRRFSQSRSATMPTSNNTMSSDSSNHRSLMKNIDTAIARRHSPNPSESGEVGSLRESNLLGRDSPGGSPVPQSGLLPPSSTAGNVSASPHRSSFGHRSRNSTDSISSNAAIYGSGVPPDAAALLKNGVSLGDLVNAPRGSDEHGQRSGQDGNRHSPQDTGDRSAGTDPPGSAKGSSFFSSIFKGLKKPDDHDSPTSPSVCKYCRHSNAGENSQERPASKRAGSGRVLILATADCWNYRMVDVTDVGTPSELRQLICINLGLPSSDGAQIYLTELGRFEHDEEPLDDAKLLSTKTHVGDSVGSLKFFVRPSMFQNGSPATTSFGNGPVAVEEGDVNAKDGRQRSGSSAATSKQEPLEGRERDDKMLTAEAIQYRAEQLRKQEEYLAKRRQMIDAKESSPSAETPYGIVGRTVNFDVPRVSPYEDRKVDTLFPQRKAPAPPENPSATLLRAESRRKNHGTRLSQDSNTSGGRPKRASSDLREEVAFEKQRKRPGMPNPEDGIHGLLVGMGERMAGIGRPTPSGHRGLSPHRVSSMPVTNTEANAQGKSSPKTGPVPGSPGSTTWSAKNVPFLVPDYSPYPGPDNRGFAGAVPGPDQFRGGTGDAKIHRSARVPSPGDVSPSSREPSHALATTTSEKRKSHGPDTDFQGNDVRFSQASTLHENSNENRNAAGDDSGDDSDDGLFAVPLSARNNATSRKTGASAEGGESDGSGKRPSLRVNTKRSRKAVSVAFQSPQSSGDSKTPADGEEDGANGRSSQIDDPEVKLSRRKSFIEKDVWANRPPTDALINNLEDFFPNVDVDQPVLEDGEGPSPIDEADESEQQNAGASSSVPPIPPLPAGLASGAGRAGSTYNESDTLGSDESTLKALDSRPTSMQTLAGRSVRRSGGLGRMKSIREVARGAHEASKRYTQASGPLNSRAGTGPGDRNTNLMRRKSTKMFNANIVQIQPERGSLNMALSQSTIPQDNLPTQQGNRDNIPKRQTTFRWFKGQLIGKGTFGRVYLGMNATTGEFLAVKEVEVNPKAAQGDQKKMQELVAALNREIDTMQHLDHVNIVQYLGCERKERSISIFLEYISGGSIGSCLRKHGKFEEPVVASLTRQTLSGLAYLHREGILHRDLKADNILLDLDGTCKISDFGISKKTDNIYGNDKTNSMQGSVFWMAPEVVRSQGEGYSAKVDIWSTGCVVLEMFAGRRPWSKDEAVGAIYKIANGETPPIPDDIREEISPIAIAFMLDCFTVDPTDRPTADVLLSQHPFCEHDPNYSFYDTELYAKIRHAL

SEQ ID NO: 4350 - DNA, 3873 bp, Myceliophthora thermophilia
atgcctgccgaccaagttacagccgggatcgcaaggctggctcttggcacatcacacaccattgctaactcgccatcaccagtggtgcaacctccagggccaagtccttccgggaatggcggacggctggcctcccggctagtccaagattggctcgccggctgtcctttgcagggcaagcacggcgaaccactgatcgagtgccccccgctacgtgttttcccccatcgtcccgatgggggtcccgatcacgaccttgtgtccttgccctctcagagctatgtcgcggcacacgatccagagggtcgaggcaggactctgctctcctgtatgtgcagtcactgccgctaccactttgtcttccggatctaccctccccctcttcaggagcagagcacggcacacctgcagcaccacttccgtattgaggaagctgaatgggatactactgcattggagcctgccatgtcccggccgtccacacagagctctgttttgggcaggtttcggtatgtctgcaccctttgtggcattgtcgttagcctggatatctctctgccccggctgaggccggagtggttgaagatgatctcagatgaggacaggatcaggaagtccctcaaggccgccagggaggaagacccacagcgttatgcagatgtcggcacagagaaggagacacattataggacaacagctctccacaccttgaatcagtatatcaagaatatactggaagagagcggtacagggccccgtaaaaggatctcgttccggaacaagacattccaggtccagtttggccgggattgcgacgagattttccgatatctcggttttgaggaggaccacgacgcaaataccaacgagtcatactggatccctccgcgattaccgccccccgagggcaaaacaccaatcggatcctctagggccttctacgaggatgtgaggtccgaagtgcagagcgtctttgctggtaaaccacctgcgcagggcgagccaacggtcatgcccgtctcaccggcaccccgcgacgaactcgagaaggtgctggggtgtgacaagagccgccgctgttttagcaccctccccgtgatcgaaaatgaggcccgacactttgccacgctcggtgccccggtcgatgccgacgatgcccttctcaagttcgcgtacagtcggcaggcggagttggacccggaaaatacctcgacctacttggaagcgctcggcaccctcgccggtcgccggtccgaggaactccagatgtttgtcttcactcaccaggagttgctcgcaagacagcaaaaggaggccgccgccggagggcccaacgcgagcccggttgagaaagcgtacgctcatttcggcctcaccaagtcctgccctgaggatcctgcctttttcattggcgtgtacaggacctatagggaccagtctcctgcgcagaagtccgaccaccgactcgccctgctccagatcgccaacgaccgccaaagtgatgagatcaggaacgaggtctttggaaagccgatggatttgcaggaagcttgtcagtttctccgcgtggaaccgggatggccaatggacagcattgcagtcatggcacaaagtatatcctccgactcggacatggatcaactagatcttctccttcttgctctcgatgcgatctcgctctcccggggaacggacgacccgaaccgtcctgagttcgagagcgtcttggccgagctacggtccattcggcggtctcaactaacttcttccggcactgagcacgtcggcgctgcggtctcagcgtccgaccacgctagtgacgctgtggatctggagctgccggtcgggctggccaaccttcgcaacacgtgttacctcaatagcatactgcaatatttctactctgtgaatgccgtcagggatctggcattgaacacggacttccctgccctagaaccgaccgaagcgaatctcagcaatcttttacgtacggatagcagcagcaacaccggccatgatcagaggcggactgatttggagaccggtcgagccttcgttggccacgagttcgcgcgtgagctgagcaccctattccgttccctaaatgcttctgcggaaaactcgatcacgcctcgccaacgtcttgccaacgctgccttgttgaggcccgagaagctccgtccacagtcagcagatcccacagctgtcccaggtgcaagcaacgatgatgcgccgccgctgccgccgcgtatagccaagggtgctgtcacagaagccaaagacacgcccatggcaggagttgaacaatccgacgccgcaagttccggaagctcggagacgctggtcgatcaatccagcggagaaagtcctctaatttttgcactcgaggaggaggatttgaaggagaaagctgctgcggccgcagtgacatcggcagcaggtggctccaacagaccagcaagcgaaccgcagactatcagccgaacgagtgaacctgaggtgaaaatgtcgaagctcaccgttgaggagctcgccgtagaactcgacaagcctaatgttgggtccgaccagatggacgttgacgaggtcatggggaatgccatcgaccacctgcgagccgccttcaaggtttccaccgtcggcaattctgcagccccgccagatcccatcgagcaggctttcttctcaaccttcatcgacaaccgcaagaagatcggtgactcggaatggaaccggaccaccaggtctgatcgctgggttacagcgtatcctgctcaatccgggacgttggacctgtacgatgctttggccaactcgttcgacattgagcccctaccgggcaacctcttatctttcaccaccatcgaacggcccgcgccgcattttcacgtatgtatccagcgatccgacggcgttcggaagaactccaaccccatcaccatacccgagacattgtatctcgatcgattcatgcataccgccgagactcaatcctctctcttcaaaaggagaaagaggaagtgggacatcaaaacaagattgagcgaaatggtaacccctgcaaaaaagcgtctggaaacagcgaaacagcagtcgcagattggaggccgtccctcaaaggccggcgctcaggatgatgggctcactgaagaggagatcgatggatttctggtccttgggggtctggatacgcggtatcagattccatcctcgtctatggttgatggcgttggtgtctcgaatgacgaacccgagactcagagcttcttcgcccttgatccggacctaaagcggttggcgaataaatacggcgttgaagagcccgatctctctctgaccgtcgctgcagacccgcccccaaagagcgatgcaaccacaacatttcccccgtcagacttggatgaattttgggaaagatttgcggccgaggaggctgaagagaaggagcgtctgattaccgagcgagacagactcttcagcgatgctcaaaacgtcgcttaccgcctccatgcagtggtgtgccacgcaggatcttctgcctctgccgggcactattgggtatggatccatgactttgagcgagatgtttggcggaagtacaacgacaccacggtttcggtgcacccagccgagttcgtcttcggggagctcaacaccaaaggtgagccctactacctcgcatatgtcaaggccgacgaggtccagaatctcgtcagtataccacgccgtcaaccgcaagctccgccacctgtgccaccgcggccgaggtcgagtctgggtgccgtcaaggccgacggggaagacaatgtcatggctagcattgagcactgggaagacgtggagatgctgccgcctccgtactcaaacccttag

SEQ ID NO: 4351 - protein, 1290 aa, Myceliophthora thermophilia
MPADQVTAGIARLALGTSHTIANSPSPVVQPPGPSPSGNGGRLASRLVQDWLAGCPLQGKHGEPLIECPPLRVFPHRPDGGPDHDLVSLPSQSYVAAHDPEGRGRTLLSCMCSHCRYHFVFRIYPPPLQEQSTAHLQHHFRIEEAEWDTTALEPAMSRPSTQSSVLGRFRYVCTLCGIVVSLDISLPRLRPEWLKMISDEDRIRKSLKAAREEDPQRYADVGTEKETHYRTTALHTLNQYIKNILEESGTGPRKRISFRNKTFQVQFGRDCDEIFRYLGFEEDHDANTNESYWIPPRLPPPEGKTPIGSSRAFYEDVRSEVQSVFAGKPPAQGEPTVMPVSPAPRDELEKVLGCDKSRRCFSTLPVIENEARHFATLGAPVDADDALLKFAYSRQAELDPENTSTYLEALGTLAGRRSEELQMFVFTHQELLARQQKEAAAGGPNASPVEKAYAHFGLTKSCPEDPAFFIGVYRTYRDQSPAQKSDHRLALLQIANDRQSDEIRNEVFGKPMDLQEACQFLRVEPGWPMDSIAVMAQSISSDSDMDQLDLLLLALDAISLSRGTDDPNRPEFESVLAELRSIRRSQLTSSGTEHVGAAVSASDHASDAVDLELPVGLANLRNTCYLNSILQYFYSVNAVRDLALNTDFPALEPTEANLSNLLRTDSSSNTGHDQRRTDLETGRAFVGHEFARELSTLFRSLNASAENSITPRQRLANAALLRPEKLRPQSADPTAVPGASNDDAPPLPPRIAKGAVTEAKDTPMAGVEQSDAASSGSSETLVDQSSGESPLIFALEEEDLKEKAAAAAVTSAAGGSNRPASEPQTISRTSEPEVKMSKLTVEELAVELDKPNVGSDQMDVDEVMGNAIDHLRAAFKVSTVGNSAAPPDPIEQAFFSTFIDNRKKIGDSEWNRTTRSDRWVTAYPAQSGTLDLYDALANSFDIEPLPGNLLSFTTIERPAPHFHVCIQRSDGVRKNSNPITIPETLYLDRFMHTAETQSSLFKRRKRKWDIKTRLSEMVTPAKKRLETAKQQSQIGGRPSKAGAQDDGLTEEEIDGFLVLGGLDTRYQIPSSSMVDGVGVSNDEPETQSFFALDPDLKRLANKYGVEEPDLSLTVAADPPPKSDATTTFPPSDLDEFWERFAAEEAEEKERLITERDRLFSDAQNVAYRLHAVVCHAGSSASAGHYWVWIHDFERDVWRKYNDTTVSVHPAEFVFGELNTKGEPYYLAYVKADEVQNLVSIPRRQPQAPPPVPPRPRSSLGAVKADGEDNVMASIEHWEDVEMLPPPYSNP

SEQ ID NO: 4352 - DNA, 444 bp, Myceliophthora thermophilia
atggctctgaagcgcattaacaaggaactcactgacctcggccgcgatccgccctcgtcgtgctctgccggcccttcgggcgaggatctcttccactggcaagcgacaatcatgggtcctgctgactcgccgtacgctggcggggttttcttcctccagatccagttccctaccgactatcccttcaagcctccaaaggtccaattcaatacgaggatctaccaccccaacatcaacgcaaacggcagcatctgcctcgacattctccgtgaccagtggagcccggcattgaccatctcaaaggtcttgctctccatctgctcgatgctgaccgacccgaaccccgacgacccgttggtgcccgagatcgctcatgtatacaagacggaccgagccaagtatgagcagacagcccgcgagtggacccggaagtatgctgtttag

SEQ ID NO: 4353 - protein, 147 aa, Myceliophthora thermophilia
MALKRINKELTDLGRDPPSSCSAGPSGEDLFHWQATIMGPADSPYAGGVFFLQIQFPTDYPFKPPKVQFNTRIYHPNINANGSICLDILRDQWSPALTISKVLLSICSMLTDPNPDDPLVPEIAHVYKTDRAKYEQTAREWTRKYAV

SEQ ID NO: 4354 - DNA, 1791 bp, Myceliophthora thermophilia
atgacggtcccgaccccctcccacgatgagcccgtcgtcgtcttggcctcgacgaggaccgtcatcacgcttccggatgactcgctcgtgctcacccccgcaacgataatcatctcgccggccactggcaagatcctctccgtcgtctcacaggtcctccctcagagctcctttccgccggagaccctataccatgactatagcccgaagctcttgctcccggggctcgtcgatgctcatgtgcacctgaacgagcccggtcgcacagagtgggaaggcttcaacacgggcactcaggctgcggcctccggaggtgtcaccaccgtcattgacatgccattgaatgccatccctcccacaaccaccctcaagggcttccaggagaagctcgctgctagccaggggcagtgctgggtcgacgttggcttctacggcggcgtcatccccggcaatgctcacgagctgctccctttggtagaagccggcgtccgtggcttcaagggcttcctcatcgactcaggcgtcgaggagtttcctgccgtgtcgccaagtgacattgcactagcaatgaagacgttgaatggcacgcccaccacgctgatgttccacgccgagatggtccctccggctgccgcccccgaaggagacgcagcgcagcaatccgaagccccggcccagcccgccggcgaaccgggcagctacggcactttcttggactcgcgaccgcccgtcttcgagacgaccgccgtggagcagatcttgtcgctggcccacctggccccgcagctgcacttgcacattgttcacctttccgcggccgagtgcgttcccgtcctgcgcaaggcgcgccaggacggcatcaacatcacggccgagacgtgcttccactacctcggcctcgcgtccgacgacatcccggacggcgacaccaggcacaagtgctgcccgccgatccgcgcgcagacgaaccaggacaagctctgggacgagatcaccgacgccgacgggtgcattaagaccatcgtctcggaccactccccgtgcacgccggagctcaagctgctgccgccgcaccttcagaccgcctaccaggaggggccccggccggccgtgcggcacgccgactctggcatcgaggtgccgcagctaggaggggaacaggggattggaggggggggagcgaagaaggagaggaggcgagagaaagaagcgaaagcagaacttcgagcacgaggacgggaaaaggaaaaggaggatgaggatgaggatgccgtcgacttgcttcccggggcccaaacgcccggcgcagccacaacggcggcggcggcggaaggatcccccgccgcctgcgcagccgaagccaaagagcaaggcgacttcctcgccgcgtggggcggcatctcgtcggtcggcctcgggctgccgatcctgcacacgacggcggcggagcgggcggcgcgcggggaccgggcgccgtccgtcgtcgacattgtgcgcatgtgctcccaggcgacggcgcggcaggtcgggctggcgcaccgcaagggcgggctgcgcgccggcatggacgccgacgtgtgcgtcttcgacgacgccgacgtctggaccctgcgcgcggccgagatgcgctggaagaaccgcgtctccccctgggagggccacaccttcaccggccgcgtccgcgagacctgggtccgcggccagagagtattccagcttggtgggccgaactccggcttcgtgatgggcaggccggtggggcagccgatcgtcgagcggcggaccgagtaa

SEQ ID NO: 4355 - protein, 596 aa, Myceliophthora thermophilia
MTVPTPSHDEPVVVLASTRTVITLPDDSLVLTPATIIISPATGKILSVVSQVLPQSSFPPETLYHDYSPKLLLPGLVDAHVHLNEPGRTEWEGFNTGTQAAASGGVTTVIDMPLNAIPPTTTLKGFQEKLAASQGQCWVDVGFYGGVIPGNAHELLPLVEAGVRGFKGFLIDSGVEEFPAVSPSDIALAMKTLNGTPTTLMFHAEMVPPAAAPEGDAAQQSEAPAQPAGEPGSYGTFLDSRPPVFETTAVEQILSLAHLAPQLHLHIVHLSAAECVPVLRKARQDGINITAETCFHYLGLASDDIPDGDTRHKCCPPIRAQTNQDKLWDEITDADGCIKTIVSDHSPCTPELKLLPPHLQTAYQEGPRPAVRHADSGIEVPQLGGEQGIGGGGAKKERRREKEAKAELRARGREKEKEDEDEDAVDLLPGAQTPGAATTAAAAEGSPAACAAEAKEQGDFLAAWGGISSVGLGLPILHTTAAERAARGDRAPSVVDIVRMCSQATARQVGLAHRKGGLRAGMDADVCVFDDADVWTLRAAEMRWKNRVSPWEGHTFTGRVRETWVRGQRVFQLGGPNSGFVMGRPVGQPIVERRTE

SEQ ID NO: 4356 - DNA, 1371 bp, Myceliophthora thermophilia
atgcagttaggggcgggggtttcggtggttcgcggagccggaagcgccacacgagtcggccgggttgcgcggatacgacggccgacgtgcgcagagtgcctcggggcggtgtcgctcgacggccggtcacctcagtctagggtcttgttccactcggggcggccgcggccgtcggcgtgggcggccgccgtctccgtcgccggcaacatcgtctcgaatgccgtcacgagggcgaccaagggcgacctgcccaccatcgatcccctccggatcgtggccaaggagatgaagttcctgacgggcaacatcaggaagctcctcggctccggccacccttcgctcgaccgcgccgccaagtactacacccagtccgaggggaaacacatccggccgctcatagtcctgctgatgtcgcgggcaacatcgctctgccccaaagcgccacaccgccaacaggcgaccctgcaggcctcggccgccatcgacacctccatctccccgctgtcgatcctcgccgattacaacccgtccgccggcgccgagagcgagccggtcctcgccgacgccgatggcatcctcccgtcgcagcggaggctagccgagatcacggagctgatccacacggcctcgctattacacgacgacgtcatcgaccattccgtgtcgcggcgcggggcgccgtcggcgaacctcgagttcggcaacaagatggccgtgctggcgggcgacttcctcctcgggagggcgtcggttgcgctggcgcgcctgcgacacgccgaggtgatcgagctgctggccaccgtcatcgccaacctggtggagggcgagttcatgcagctgaagaacacggcgcgcgacgagaccaacccgcaatggtccgaggacaccctgacctactacctgcaaaagacgtacctcaagacggcgtccctgatcagcaagagctgccgcgcggccgccctgctgggcggcgcggacgcgcagacggtcgacgcggcgtacaactatggcaagaacctcgggctggcgttccagctggtggacgacatgctcgactacactcgcagcgagaaggagctgggcaagcccgccggcgcggacctggaactgggcctagcgaccgccccgctgctgttcgcctggaagacaataccggaactcggggcactggtggggaggaaattttcccaagaaggcgatgttgaacgggcacggaatctggtgatgcaaagtgacggcattgagcagacgcgcgctcttgctcaggactatgccgataaggccatcgcctccctcagcctgttcccggagagcgaggccaaggatggcctcgtcgagatggctgtcaagacgctacagcggaagaagtga

SEQ ID NO: 4357 - protein, 456 aa, Myceliophthora thermophilia
MQLGAGVSVVRGAGSATRVGRVARIRRPTCAECLGAVSLDGRSPQSRVLFHSGRPRPSAWAAAVSVAGNIVSNAVTRATKGDLPTIDPLRIVAKEMKFLTGNIRKLLGSGHPSLDRAAKYYTQSEGKHIRPLIVLLMSRATSLCPKAPHRQQATLQASAAIDTSISPLSILADYNPSAGAESEPVLADADGILPSQRRLAEITELIHTASLLHDDVIDHSVSRRGAPSANLEFGNKMAVLAGDFLLGRASVALARLRHAEVIELLATVIANLVEGEFMQLKNTARDETNPQWSEDTLTYYLQKTYLKTASLISKSCRAAALLGGADAQTVDAAYNYGKNLGLAFQLVDDMLDYTRSEKELGKPAGADLELGLATAPLLFAWKTIPELGALVGRKFSQEGDVERARNLVMQSDGIEQTRALAQDYADKAIASLSLFPESEAKDGLVEMAVKTLQRKK

SEQ ID NO: 4358 - DNA, 1416 bp, Myceliophthora thermophilia
atgggccttcagaacgacgagatgaggcttcagaacggccagaccgggcttgagaacggcaagatggagctcaagaacggtgagaaggggcttaaggacggtgaccatgttaataccccaaatgggcaccggagcgacagaggacggacatgtgtgccttccgacacccgcgactatggagcgtggctgggccaaattcttgaccacattgacaaacatggagagcaggagcttcttcctgtgctgcaagagttcagagagcttatcacgtcggatccccgcttctacatgtacttcacagggatgtgggaagaaatcccggtcaaggagccagatccgaaaaatccaacggtgcagcctcggatccgcgactacgagcaaatgttgcaggttatgaaccatgtgcttgtggcagcacctgagtggacccaggcagccgcgagcgccggcctcgccggcgtacctctggtggcgatgttcgacgaggccatgagcaccccgagtggccatgctgcgttcctggatcctgatgtcaacctcatgttcaagaagatcctcaacacgtggggcaagtacctgcagactccggagtccgtagaggttctgggcgatcatgaaaacggctggttctgccaagcggcgttcaaagagctccttgaggtcgccaacgcgccctataacacctccttcaggttggaggagttatacaaatgcgatccgtcgaaggagcactttgggtttaagtcatgggacgacttcttcacccgccagtttcacgagtcggtgagaccagtcgcctctcccgacgacgacaatgtcatcgcgagcccttgcgagtcgaccatcctcaacattgcctacaactccaagctgcgcgacaagttctggatcaaggggctgcggtactcggtcgccgacatgctcgggcacgaccctctggcagaacatttcgccggcgcgacggtctgccatgccttcttgtcggccatgtcataccacagatggcacgcgccagtctcgggcaagatcaagcgctgcttcgtgcaagagggcacctactttagcatctcgctgtccgatttgttcgcggacggcggcgatgccaagggccacctcgcgacgcagggttacgcttcggcgatggccacgcgcggcatcgtcttcgtcgaagccgacaacccggcgatcggcctggtggcgttcatcgctatcggcttgacggaggtgagcacgtgcgaaatcacggtcacggagggccagcgcgtccagaagggcgacgagatcggtatgttccatttcggcgggtcggcttgctgtctgctcctccaaaacggagtccgggtcagcggattccccgagatccggagcccggtgaacgtgccggtacgaggacgtctggcggtcgtccagccgtga

SEQ ID NO: 4359 - protein, 471 aa, Myceliophthora thermophilia
MGLQNDEMRLQNGQTGLENGKMELKNGEKGLKDGDHVNTPNGHRSDRGRTCVPSDTRDYGAWLGQILDHIDKHGEQELLPVLQEFRELITSDPRFYMYFTGMWEEIPVKEPDPKNPTVQPRIRDYEQMLQVMNHVLVAAPEWTQAAASAGLAGVPLVAMFDEAMSTPSGHAAFLDPDVNLMFKKILNTWGKYLQTPESVEVLGDHENGWFCQAAFKELLEVANAPYNTSFRLEELYKCDPSKEHFGFKSWDDFFTRQFHESVRPVASPDDDNVIASPCESTILNIAYNSKLRDKFWIKGLRYSVADMLGHDPLAEHFAGATVCHAFLSAMSYHRWHAPVSGKIKRCFVQEGTYFSISLSDLFADGGDAKGHLATQGYASAMATRGIVFVEADNPAIGLVAFIAIGLTEVSTCEITVTEGQRVQKGDEIGMFHFGGSACCLLLQNGVRVSGFPEIRSPVNVPVRGRLAVVQP

SEQ ID NO: 4360 - DNA, 402 bp, Myceliophthora thermophilia
atgccaacacagcggtatggacaagcaaggggggaatgggcgactccggttggaagacggccgctgggtcttaaggcgaatgactgcagccgcgcagggtggggagagccgctttggggccagcggcgcccagcctggttgcttcacggcgaggcgtcgttcgaaaccccgcgtattgtgtactgtatggctctctgcctgctgaaaagagcaacgtgcaacgcccacgccttgtccatcttcggcagcaaaccggggtcttgttgcatggaggcgctgagccatgggttccgtccagcttggtttctccaccgtgccatcgtcccgtctcagagcacggggtccatccggccaatgcccctcctcaagatcccggcaaaaggaacgtcgaggctgaactga

SEQ ID NO: 4361 - protein, 133 aa, Myceliophthora thermophilia
MPTQRYGQARGEWATPVGRRPLGLKANDCSRAGWGEPLWGQRRPAWLLHGEASFETPRIVYCMALCLLKRATCNAHALSIFGSKPGSCCMEALSHGFRPAWFLHRAIVPSQSTGSIRPMPLLKIPAKGTSRLN

SEQ ID NO: 4362 - DNA, 3396 bp, Myceliophthora thermophilia
atgggtaacgagtcaagcaggcccgagcagctcgagggtaggtctcgctccctgtctccacttccgcgggactatcagctttcgcccgacgctgccgacagcttgtctgctcttccgtcaacaatgcccgcgtcgctccaagttgcgaacgagggctcaggccctccaggcgcacctggctcgcttgcctggcatcggcggcggcgacgagcccgtgccctctccccagagttgcctcgcgcctcacctccgtttgagttgtcggacaatgagcacccggctgacgatcaagaattcccgcttacggctcatgcggtatctacggcagagctttcgctgcctgcgacccaacctacccgtgtaaagtcaaagcgcgccaaaaaaaagtcttcggagaagaagaggaaagccgagctcaaggaggcagccaaagccgcacatgatgaggccgttagggttgaagcggcaattcaggatcacaaaaagcgcaggcatcgttcaaccgcaccttctcccttccccccacgggacggagagcaggcgaccggcgaccccgaaccctataatgagctggtggaagcgacctctccacgaagccagtcactgaagcattcccggctcagcaagaagtacaaggggctggggacggaggtcactacgggggacggcgaagaggaagctacgactgtacatggccgctcgatattcgacctcgaaggcgacgacgacgccccatcaagcgcgcggccacaaggaaagcgaccccggcgagatagcgattccaaaccacgcaaaaaccggaagtcatcccggtcctcgaacttaggactagatgatggcttggaggcagggcgttcggaagaacctatcgacagactggctctggaaggcaccaatgctgatttccagcttgaccgtggtggcggtactggaagggaaggagaaacagatatgacggaggcggcgcgctcatcatcacctgtgctcgaggaacgcatatccgccgacggtgcagcgcgtcgagcatcaactacttccaaccatggttctcaacgttcaaactccgactctggatacgaagaagccgaggttcaaggcatgcctcagcgagaacatgaaggggatgccctagagcgtagaggctcgccacagctgcgaggtgatgaccatctcgcagcaggtgatcaagcgaatcaaaatgacgatgacgagatctcggttgcgtctgacttgcaccgttcacctgtcgcatccccgacgccaaactcacccgcagacgcgaatgtcgcaaacggagagttgaacgatgacgcagtcgagagtgctccctcgcagcacgactctgacacagcagtggctccgttcgaatcggttgccaaaacctcaagttcccgttctagcgccaagaggaagacaaaggtgccatttttttctcgcggagaggaggaaagtgcgcgtacagctgctgaacccacccaggatgccgccacctctcaagagcagtcaaggcggcggccaggggccgagtcaccagtgccaggcgaggctgacccgtcagatactgcccgcaagccgaagcccaagaagcaaaagcgacggcccgaggcagagactgcggtggctgccaacgaaccggatgcgcaggctcagccggagggatcacggtacaggaccggccccctttcgcaaaccgaggagaaccagatcaccagagcgatggagcggtttcgggagaacgagggcttgacccaacaagaactcaaccaggtgatccacgacaatccccagaagagtgagcggccaatccaccgtcaactctgggccacgatacaggatgcatgcccgacccgaccccggagaaagttgattgagtggtgcagacaacggtataacaactgggcagggcggggtacctggaccccagaacaggacgatgagttggtggacctggtcgcgaagcacgggaagaagtggagctacatcgcggggctgatcaatcgctatcaaaaggacgtccgtgatcgatggagaaactacctggtttgccgcgacaccgttagaaccgacgcgtggtccgagggcgaagaagagaggttccgcgaggtggtggagaaagccatcgagaagattcgggagggagtcgggaaagacagcaagaaaccagccgaggcgctcatcaactggctcgatatcagccaagccatgggctacaccaggtcccggctccaatgcatggagaagtggaagaggatgcgcgcagccgagccattgcccgacacagtcccgactgtgttaccgcagggcaactcatggcgcctagaaaaggcgcgcgaggatctacggaagatgacagcagaggacaagtaccgcttgatgtgtgcaatccgcgattcgggagtggaaacagacgcgaaaatcaactggaagccgatcatcaagggcacgtttcagggtgtgtttgagcggacggcactcgtcgtcacatgggggaggctgcggaaggcagtgccggactgggagaccaagacaacgcgcgactgtgcccagtatctatgcgaaatgtacgagaacgaaggccactttggctcttctgagatcgccgaaacagccgaagacgaagaaaacgcggccgtttctgccaacaagaaacgacgaaagggcaagaaagtggttcgcccgacgtccacagacgacgagatagcgccgagtctcgagacagcgacgaccggagctcagtccaaggaggctgagatcgtaccatctacgataaacgaggacaacgattcagcatccagaggatttctcccgaagcgtggcaacaaggggaggaagacagccacagatgcatccacagatgcaccatcggaacggaccggagatgctgcagatctggatgtgcagacagaagaatctgcccccgtagaatcgcgcaccgacccatacagcgggaagaggccacgccaggcggagaaggaacagagcccggaactcaacagtggacaggcagagttgtcacccagtatagaagcccaggctgcccggttcagaaggcgcgagagaatagggagtacggtggagagggggagcgtcaagggcaagggcaagggcaaggaatttcggccactggggtctgagaccaaggcttcgaaattttcgaagaggcagcgtcgcgcatctctgtccgatgtggaggatattgagagccccaagctcaagaaacgaaagacgctgagttcgtcttcaaaggcagaggctgatgggatcgcttcgcccaggaccagggaagacaaggcaccggaaagctatgggaagtcttggagcgtcatcagcagtgacatggatgatatggaggatatccccgcgacattgcctgtgtcgagccaggctgcgcattag

SEQ ID NO: 4363 - protein, 1131 aa, Myceliophthora thermophilia
MGNESSRPEQLEGRSRSLSPLPRDYQLSPDAADSLSALPSTMPASLQVANEGSGPPGAPGSLAWHRRRRRARALSPELPRASPPFELSDNEHPADDQEFPLTAHAVSTAELSLPATQPTRVKSKRAKKKSSEKKRKAELKEAAKAAHDEAVRVEAAIQDHKKRRHRSTAPSPFPPRDGEQATGDPEPYNELVEATSPRSQSLKHSRLSKKYKGLGTEVTTGDGEEEATTVHGRSIFDLEGDDDAPSSARPQGKRPRRDSDSKPRKNRKSSRSSNLGLDDGLEAGRSEEPIDRLALEGTNADFQLDRGGGTGREGETDMTEAARSSSPVLEERISADGAARRASTTSNHGSQRSNSDSGYEEAEVQGMPQREHEGDALERRGSPQLRGDDHLAAGDQANQNDDDEISVASDLHRSPVASPTPNSPADANVANGELNDDAVESAPSQHDSDTAVAPFESVAKTSSSRSSAKRKTKVPFFSRGEEESARTAAEPTQDAATSQEQSRRRPGAESPVPGEADPSDTARKPKPKKQKRRPEAETAVAANEPDAQAQPEGSRYRTGPLSQTEENQITRAMERFRENEGLTQQELNQVIHDNPQKSERPIHRQLWATIQDACPTRPRRKLIEWCRQRYNNWAGRGTWTPEQDDELVDLVAKHGKKWSYIAGLINRYQKDVRDRWRNYLVCRDTVRTDAWSEGEEERFREVVEKAIEKIREGVGKDSKKPAEALINWLDISQAMGYTRSRLQCMEKWKRMRAAEPLPDTVPTVLPQGNSWRLEKAREDLRKMTAEDKYRLMCAIRDSGVETDAKINWKPIIKGTFQGVFERTALVVTWGRLRKAVPDWETKTTRDCAQYLCEMYENEGHFGSSEIAETAEDEENAAVSANKKRRKGKKVVRPTSTDDEIAPSLETATTGAQSKEAEIVPSTINEDNDSASRGFLPKRGNKGRKTATDASTDAPSERTGDAADLDVQTEESAPVESRTDPYSGKRPRQAEKEQSPELNSGQAELSPSIEAQAARFRRRERIGSTVERGSVKGKGKGKEFRPLGSETKASKFSKRQRRASLSDVEDIESPKLKKRKTLSSSSKAEADGIASPRTREDKAPESYGKSWSVISSDMDDMEDIPATLPVSSQAAH

SEQ ID NO: 4364 - DNA, 1371 bp, Myceliophthora thermophilia
atgtcgcaacaaccatcacagccatcacagccgaccttgatcaacctcccgcaaccgccatcacatccagataccccttccgaaatacctggtacacccacgagcacgaccacctctctctccgccctatccacaactgctatcaaagatggccaccgcggcgctctccatcaccgcgggcaccaacacagtccatccaccaatagcctcgaagccgagcgcgccgaccggatcagccgcctgaccggcctgtcgagcgtctcgaccctccgcggcacgcccccggtttccgccaccagcagctaccaccaccaccgcagcagcagcagcaacacagcgcccattctccccacgcgatcacgacctctttcggttccccaacgaacggcggtcgtctgtcgtctgcggcgcgcttctcccggcctaatttcgacgccgcccggacaacctctgggtcgtggaccgacggcttcgttgggccacgaacggccaccaaccgctgacacgggcgccgacacctccacgctgggcgaggaggaccacgacgaggacatgctgacagagatggactcggcgagcgcgagcggctacatgggccccgacaccgacgctgacgccatggacgaggacctggacaacctcacgtcgcgcagcgtcggcggcttcgaggaccgcatgtcggacgacggcaccgccagcctggtcggcttcggcgagggtgccggcagcaccgtctccggccccatctaccaccgccgcccgctcccctcccaaggcggcggcggcggcggcggcggcggcggcggtggggggcgcagggaggctgcgcgacggtcgtgggagccggaccgggagcgcgaggacacacccgtcagccagtcggcggtgcgcgagaggcgggaggcgcgcatgatggacggcgtggcgctcgacgcagcagcagcagcagcagcagcagcggacgacgacgacgacaacgacaacgacgacaacgacaatgacaacgactacgacgacagcgacgacgtctttgtcgacacaaccaccagcgggcccgtgccggatgaccgccccgtgccccccgcacacgccactaccgccgccaacaccaacaacaacaacaacaaacccctccgcgagaggcagcatcgcccgcatcatcgccatcatcgtcaacatcaacatcatccacctcacgccaccgcgcaaacgcagcaaccgtctctgacgtcaacacctccgcgcgagcctgcggagtgtctggttcgcgagagacaggacgagggagggcagggccgagcccggagtcctgcgttggggagcaccaagggaggggaacgactgggcaagttctttttcgaggatcgttag

SEQ ID NO: 4365 - protein, 456 aa, Myceliophthora thermophilia
MSQQPSQPSQPTLINLPQPPSHPDTPSEIPGTPTSTTTSLSALSTTAIKDGHRGALHHRGHQHSPSTNSLEAERADRISRLTGLSSVSTLRGTPPVSATSSYHHHRSSSSNTAPILPTRSRPLSVPQRTAVVCRLRRASPGLISTPPGQPLGRGPTASLGHERPPTADTGADTSTLGEEDHDEDMLTEMDSASASGYMGPDTDADAMDEDLDNLTSRSVGGFEDRMSDDGTASLVGFGEGAGSTVSGPIYHRRPLPSQGGGGGGGGGGGGGRREAARRSWEPDREREDTPVSQSAVRERREARMMDGVALDAAAAAAAAADDDDDNDNDDNDNDNDYDDSDDVFVDTTTSGPVPDDRPVPPAHATTAANTNNNNNKPLRERQHRPHHRHHRQHQHHPPHATAQTQQPSLTSTPPREPAECLVRERQDEGGQGRARSPALGSTKGGERLGKFFFEDR

SEQ ID NO: 4366 - DNA, 1356 bp, Myceliophthora thermophilia
atgaagcccaatttcttgccatcttctccgaatcgcggcctgttgggctcgaacaaacgcggctttttcaatgatctccaggaatcgccgaccgcaaggagggccaagagagtcaggaaaaacagaaagcgcagatctaaaaggtccgaggacaagagactggagctggagaaatggtcgagcgttgacagcccttgggcacatagtcctattatccaaaatcagacttccgacatgcctgcccttcccttatccctcaaggaggaggacgaaataactcatgcactaatgtcaggggaagaggatattaacgaagatcagaaggagagaagcaagaatattggcgccaatgaaatcaaaaatcccgggaactgggccgagcacagacctgacgagggactcaggtatcctatcgacgacggcatctacaagattccagcggctcctggcccgtccaaccctaaaatcatccaccagcacgcttacgaacccagagaactcacgcctctcggcggccttgtgcccaaccgcgactatacattcagggcttatccaaacccggtccctacccatcttccacccttcgtccagacctccgaagagcccagaaggaaaaagtgtgctgaatccacgacggcagtcatgagcagaaagagcgacagagccacagcaccttttcccgacactccccaacccagtaaggaagaacccacgatagcctcatcccccatccaacctaccgcaacagcacacaagacgacggcgacggcgacggagacggagagggacgtcttgactgtcccgacgagcaccaagacccttaaagcaatcaacaagcgcctcaaggccctggaaaccggcctcgccgcttcctctgcctccagaagagccgcgaaaaaggatcagatcctcccaagaaaggagatcgaggctctgcggacggacatcgcgcgcctgcacgatcgcctcgaccgcgacgagctgcgggccgcgtttcggcactcgatgctgttcaactcgctaactaagctggcgggggacgtcggggcgctgagcggcgaggtggcgctgctgctggcgggggaccggcgggagcaggcggagcgggaccacccggccgagggcgcgacggagggcgggcagggcgctggtgccggcactccgcgcgccgcggtggtggcgagggattccaggtacaggcttaccaagagcatgcagcagtcacgcaagacgctggagcagtgtctcaggaggtataccgaggatatgaaccgtgccgagagcaaggacgatgtggtcaagtatggcggcttagttgtgcagtatgcgggtgatctcttcaagacgtttggttga

SEQ ID NO: 4367 - protein, 451 aa, Myceliophthora thermophilia
MKPNFLPSSPNRGLLGSNKRGFFNDLQESPTARRAKRVRKNRKRRSKRSEDKRLELEKWSSVDSPWAHSPIIQNQTSDMPALPLSLKEEDEITHALMSGEEDINEDQKERSKNIGANEIKNPGNWAEHRPDEGLRYPIDDGIYKIPAAPGPSNPKIIHQHAYEPRELTPLGGLVPNRDYTFRAYPNPVPTHLPPFVQTSEEPRRKKCAESTTAVMSRKSDRATAPFPDTPQPSKEEPTIASSPIQPTATAHKTTATATETERDVLTVPTSTKTLKAINKRLKALETGLAASSASRRAAKKDQILPRKEIEALRTDIARLHDRLDRDELRAAFRHSMLFNSLTKLAGDVGALSGEVALLLAGDRREQAERDHPAEGATEGGQGAGAGTPRAAVVARDSRYRLTKSMQQSRKTLEQCLRRYTEDMNRAESKDDVVKYGGLVVQYAGDLFKTFG

SEQ ID NO: 4368 - DNA, 2541 bp, Myceliophthora thermophilia
atgcccgacctcctactccatgaaccacgaaccatacaggccacgaccgcagggcttggttcagcgacgccaccactccttgaccctactaagcttaggaggaagaggaagaatgccgaccatggcctgttcgggacatcgcgtctcgtccggaatgtcggtaatcttgccctgtcactgagagatggcctgtctgcctcggagcgtgaagagatcagaaagaaggaggagcgaagacaaatactgattgcccgaatggaaaatgcatcgacctataaagcctggtacgaagccgctacggagctggatcagctcgagggcaacgacaagtggaaacttgacgactcgaccggtgaacccgactaccgtcctgacctgatccggtcttcactgaaagaactggacaccgcccggaccaactgcgacatcaacgccatgctgtatctgctcagaactgcattatcgcgggacattggcggcatggggcacgtggagctttaccgccactcttacgttgggacaaaggcgttgatcgaacaatatgtcaattcggcccttcagaccatcgagtcgttggtcgacaagtccgtctcccagaccgaactggaccctaaagacctgctggaagggatggtctacgcgagacaaaactttggtaggagtgctttgcttttgagcggaggggcaacgttcggcatggcgcatgtcggggtgctgaagacgctttacgaacagcagcttctcccccgcatcatgtcgggagcgtctgctgggtccatcgtctgcgccgtgttatgcactcgcaaggacgaagagattcccgaactgatcgaaaaatttccgtatggcgacctacgcgtttttgagggcgaaaacgagagcctcacgacccatctccacaaccttttaacgaaagggtggtggtccgatatctcaaacctgaccagggtgatgcgttcctggctcggcgacgtgacctttctggaggcttataaccggacgcggcgaatttgcaacatttgcgtgtcgtccgcctctatctacgacgtgccccggcttctcaactacatcaccgctcccaacgtcctcatatggtcggctgtcgccgcctcatgttccgtgcccctgattttcaagggccagcccttgctaatgaagcacccagtcaccggcgcccacgagctttggaccccgacgccgcagcaattcattgacggctccgtcgacaatgaccttccaatgacccgcctcgccgagatgttcaacgtcaaccactttatcgtctctcaggttaacccgcacgttatacctttcctccccagagatgagcaggtcatcccaggcaaactgagtcacgagaagccggcgcgtggcctcgctcgtgagttgctgatcaaattcgggtctattacgaaggaggaagtgctctacagaatgcagttttgcgcggagatgggcatattccccaatcttctcaccaagctccttgcggtaatgagccagaagtactcgggcgacatcaacatcctgcctgccatctcaaggagcgatctcccgctcatgctgaagaaccccacccccgagtttatgctgcgcagctgcgcagttggcgagcgagcaacatggccgaaactaagtcgcatccgcgaccgcctcgccatcgagttagcccttgatcaggctgttcacgccctgcgcgcccgggtggtcttcagcaggagccaggtcaacctccgccgcgcaatgggcgtactcaggcccatggcgtaccgacctccaggcggttccaggggcaggccggcgacgtcgggcgaaccgagcccgtcgtggggggctatttgcgtcgttcaaccgcccaactccggtgagactacgccgtcggacgaaaagacgttcgggaggcggcgggggtcgggcgcaagtatccagctcgtggtggccacgaagcacaagaagccgctacttcaggacgacgaccagtcggacgacgacgaacagctagagctcaagtttcggccgtcacgctcaagaggtggcccggctagcggtagtgggagtgggagcgggagtactactacaactggcggcagtggcggtgacggtgacagcggtgttgccagcggcagcagcaggggcagtgatgtcaggctcccgcggttaaggaggaatgccaagagccatggacatttccgctccggtaagcccgcgccggatttctatcctcgagatcgggtccggccgtttgtgggcagcgggaccgcgtggaccggagagccgatgacctcgggctccgggtcaggaggggctgaagtaggggacgacgctggtgattcaactactgctgccgaggacgaaccagggagtgcatcatcgcctatcagaatacacatctctgcgccctgggatgatgacggaacagatcaggcttttgaaggcttgcagagtgatgcggacccatatgctgctgggccgtccagtcattttcgggccgaatcgcgagaaagagactctccgtccaagctgcgatattctgaatcatga

SEQ ID NO: 4369 - protein, 846 aa, Myceliophthora thermophilia
MPDLLLHEPRTIQATTAGLGSATPPLLDPTKLRRKRKNADHGLFGTSRLVRNVGNLALSLRDGLSASEREEIRKKEERRQILIARMENASTYKAWYEAATELDQLEGNDKWKLDDSTGEPDYRPDLIRSSLKELDTARTNCDINAMLYLLRTALSRDIGGMGHVELYRHSYVGTKALIEQYVNSALQTIESLVDKSVSQTELDPKDLLEGMVYARQNFGRSALLLSGGATFGMAHVGVLKTLYEQQLLPRIMSGASAGSIVCAVLCTRKDEEIPELIEKFPYGDLRVFEGENESLTTHLHNLLTKGWWSDISNLTRVMRSWLGDVTFLEAYNRTRRICNICVSSASIYDVPRLLNYITAPNVLIWSAVAASCSVPLIFKGQPLLMKHPVTGAHELWTPTPQQFIDGSVDNDLPMTRLAEMFNVNHFIVSQVNPHVIPFLPRDEQVIPGKLSHEKPARGLARELLIKFGSITKEEVLYRMQFCAEMGIFPNLLTKLLAVMSQKYSGDINILPAISRSDLPLMLKNPTPEFMLRSCAVGERATWPKLSRIRDRLAIELALDQAVHALRARVVFSRSQVNLRRAMGVLRPMAYRPPGGSRGRPATSGEPSPSWGAICVVQPPNSGETTPSDEKTFGRRRGSGASIQLVVATKHKKPLLQDDDQSDDDEQLELKFRPSRSRGGPASGSGSGSGSTTTTGGSGGDGDSGVASGSSRGSDVRLPRLRRNAKSHGHFRSGKPAPDFYPRDRVRPFVGSGTAWTGEPMTSGSGSGGAEVGDDAGDSTTAAEDEPGSASSPIRIHISAPWDDDGTDQAFEGLQSDADPYAAGPSSHFRAESRERDSPSKLRYSES

SEQ ID NO: 4370 - DNA, 1698 bp, Myceliophthora thermophilia
atgtcgattcagcaaccgcctgaacctggggcagcgaacctcgaaagccccgtgaccggggccgaaaggaccacctcatatcctggagagtcaaccagaaagcagccaccgccggaaaagccgtccgacgtgcggcgacgctcccacatcatcctctcgttctggctgattgtcctctttctcggcctgccgatctggtggaagacgacgaccatctaccgcgccgacctgcctttgcaggagatgcttgactggtctgatggcaagaaagacggctccaatgctgacatgcacattccacaggcgtgccgtcccgtcttccctctgcgcatctccatccaagccaatgcgctgcaggagcaggaagctcagaacctcctccggctcacccagcatgccctcgacgacctcaatgacttttccgggcaccacttgcggcttcggctagcgccgccctctgcagccagccatcacgaccgcgagagcgtcttgacaatccgactagttccgggagaggcagcgacggccaagttcgacgcgcacgagccggtcctcgacataacatacccgccgaattccatcccctcgcccacctcgtcatcctctcctctcgcgacttacgtggcaggacagctgcggtcggcattcgccgaggagcaggccaccatttcgtacctcctgtcgaccaactcggttccttcagaccaccggccgcaggggctttcttcagaggtagccgactcgctcgcgaaacgaaccaccagggccctgaagtacgcgccaacatatcatctcaccttttccctctttacaagcgggccgcttccgagcagctgggatatcgacggggcaattgaggagtacatgaagcctgtgctcgacgtgctctcgccgatccacaacttcaccatcgacacccaggtgcaactgtatgcaacccccggggtccagaatcaagtgctcagcaaggaggacctttcatcatttatcaatgccgccgagtggccgctgtcgccgtccattgggggcgcaccgacggtcaactttatcgtgtttataggaaaccagaccattgcgccgtcgtcgcagagtcccgacgacggcgacacggagggacctgcttcacactcgtggctgatcccgcaatggggcaccgtctacctgctcccccttccccacgatacggcacacctctcggtcgaggcgctcaagcagcccctcctgacctttacgtcgcacctcctcgccctgacgggcaccccgcaatcaggctccctgcctctgcgcctctcgacgctgtcccggatccgctccgcggacctcctcctgcgcgcgtcgtccacgctcggctcgctcgcgcgcctggccctcgcccttccctccatctccatcccgagccgcgtcgcagacggcgtgtccaagacgattcaccatctgcgcctggcctgcgagacgctcggcgagcccgaggggcttgcgcacgcgcgaatcgccgaggcggaggcggagcgggccttcttcgaaaagagcatggtcggccagctatacttccctgacgagcacaaggttgccgtgtacctgccgcttctggggcccgtcgccgtgccgctggtgatggggttgctgaatgagctaagggcgtgggtgaagcgcaggcgagaggcggcagaggttggggaggcaaagaagagtgagtag

SEQ ID NO: 4371 - protein, 565 aa, Myceliophthora thermophilia
MSIQQPPEPGAANLESPVTGAERTTSYPGESTRKQPPPEKPSDVRRRSHIILSFWLIVLFLGLPIWWKTTTIYRADLPLQEMLDWSDGKKDGSNADMHIPQACRPVFPLRISIQANALQEQEAQNLLRLTQHALDDLNDFSGHHLRLRLAPPSAASHHDRESVLTIRLVPGEAATAKFDAHEPVLDITYPPNSIPSPTSSSSPLATYVAGQLRSAFAEEQATISYLLSTNSVPSDHRPQGLSSEVADSLAKRTTRALKYAPTYHLTFSLFTSGPLPSSWDIDGAIEEYMKPVLDVLSPIHNFTIDTQVQLYATPGVQNQVLSKEDLSSFINAAEWPLSPSIGGAPTVNFIVFIGNQTIAPSSQSPDDGDTEGPASHSWLIPQWGTVYLLPLPHDTAHLSVEALKQPLLTFTSHLLALTGTPQSGSLPLRLSTLSRIRSADLLLRASSTLGSLARLALALPSISIPSRVADGVSKTIHHLRLACETLGEPEGLAHARIAEAEAERAFFEKSMVGQLYFPDEHKVAVYLPLLGPVAVPLVMGLLNELRAWVKRRREAAEVGEAKKSE

SEQ ID NO: 4372 - DNA, 2520 bp, Myceliophthora thermophilia
atgtggatactcgaaagtgacctgtttgacggccgcgtcctatggctgcgcccaggaaagctctatcttttcggtcgcactgtcgccgagcccgggcagctcgccgtctcggacaagaccatatcgaggaagcacatctcgattcaagtcgacagtgtccctgaaggtggtgggcgcaacctccgttcgcggtcctccgtcacaatcgaggacctcaattcgaaaaaaggaacgctgttgaatggcgtccagatacgcgggcagaagaaaacactctcagaggatgtgaacgagctgaagttgggcatgtgcccaaagcttgtccgcatacgatggaatccggttgttctcagcttctcctttaccgcaaaggaactccgtttggacccgtggacgaggctgcgcgacagcctggagcagctcgacatcaaatattcggccgattatgttccagatactacccacgtcgtctcaaaaaagcgcaacacatcaaaagggctgcaagcattgatcaacggacggtatattgtcactgatagcttcatcaatgcgatagtggacgcggctactgttcctgacaatgcggaggagggctcgcctagcgcactggaagtcgatttcgaatcctcttggccgaatcccatcgaccacctgccaccccgcggcgaggagcccctagatcgaccgcccgatgtgtactcacccaacgacaagcggcaggaagtgtttgacgggtatacatttgtcttttacgaaaagaagcaatatgagaacctgtttcccgccatcactgccggaagaggtaaagccctgctcaaggacgtcattcctggcgaaacagatgtggaggacttcattcgatatgtaaaaagcgttgccggcgaaaaggggttgggatctttcgaagatggcagcgagggtaagggggtggttgtcgtgcgatacatgccaaagagcgaggatcatgagtggtatgctcagttcttgacttcttttgctcagcggctcgatcaccgcccgattgatcaacgagagtttctcgaagccatccttgattgcaacgcttccatgctccgccgacctcttgaagaagccagtcaaccctcgtcggggagggcaggcggtcagatacctaccgttaacgcaggagactgtatggatgtcgaccaaccgggttctcaacctcgagcgtcgccggaagccgctgcacaagccgctgcacaaccggaacccgtgcctggacctagacctggacggggtcgaagagctggccggagccgtttcaaaggctttgatttcgacgacggggaagagcttgcgggagaagtcaccccagtggatgctcctgagcagctccaaacggctgctgcatcccaggacagtttgttcgtctctcagcaccaaaagccgatgcttccagtggaggaaatcgttggcgaggagggcccaacccggcagacacaacggaaacgccccttgtctccggtccccgagcacgacacatcggcactgctagatgagattgcgccgacagcggcagctgccaaacgccggcggatcgagtcagggcaagaaccgctccctcctccccccgagcctgaaccggcgtcacagcctagcggagacgaagaaatggctccggcttctcccaaagggaagccgaagaagggccaagcgaaagggaaaggaaagaagataaaggaagaagatgacatcctggagcttgcacgccgccagcgtgaagaagccgaggctcgagcagctgcgcagcgcaaagaacttgaggaacttccggatgatggaatcgactacgctgcgatccgagcattgcacatcattgaagaatgcgaggttcactttcccgagactggcaggaatggccgcagccgggagcaggatattgccgacggccggtgggatccgcgatggaatggacgcaagaacttcaagcggtttcgcaaacaaggcgaaccagtcggccgccaaccacctcgcatcatcattccgctggaggaggtcaaaccgaaagagtacggtatcggggacgactactggctcgaggatgacagcgggcggcgtaaggaagacaaccggcccgggtcgcaaaatcaaacccagcagtcgtcggaggggaggtctggcagtctgggcatgggcaaggagaaggaggtcgcgcccaggcctgcaatacggcggaccattttggccattgacagtagtgacgaggaggagcggagtgagctctctgggatgccggaggacagcgccctgcctgaatcggaaccccctagaagccgggcggccaaggctgctgagaaggcgaactcacaacgcgcccggtcgcagacacacacacagtcgcaaagccaggcggggtcatcccacaagcggcccgcaccagttgactcgaatcaagagggggcggcgaagaggccgcggaggggcctcgggccgccgagtgacgacgacagcgatgacagtgatgacgagctcaaatttcggtttgggaggcgaaggtag

SEQ ID NO: 4373 - protein, 839 aa, Myceliophthora thermophilia
MWILESDLFDGRVLWLRPGKLYLFGRTVAEPGQLAVSDKTISRKHISIQVDSVPEGGGRNLRSRSSVTIEDLNSKKGTLLNGVQIRGQKKTLSEDVNELKLGMCPKLVRIRWNPVVLSFSFTAKELRLDPWTRLRDSLEQLDIKYSADYVPDTTHVVSKKRNTSKGLQALINGRYIVTDSFINAIVDAATVPDNAEEGSPSALEVDFESSWPNPIDHLPPRGEEPLDRPPDVYSPNDKRQEVFDGYTFVFYEKKQYENLFPAITAGRGKALLKDVIPGETDVEDFIRYVKSVAGEKGLGSFEDGSEGKGVVVVRYMPKSEDHEWYAQFLTSFAQRLDHRPIDQREFLEAILDCNASMLRRPLEEASQPSSGRAGGQIPTVNAGDCMDVDQPGSQPRASPEAAAQAAAQPEPVPGPRPGRGRRAGRSRFKGFDFDDGEELAGEVTPVDAPEQLQTAAASQDSLFVSQHQKPMLPVEEIVGEEGPTRQTQRKRPLSPVPEHDTSALLDEIAPTAAAAKRRRIESGQEPLPPPPEPEPASQPSGDEEMAPASPKGKPKKGQAKGKGKKIKEEDDILELARRQREEAEARAAAQRKELEELPDDGIDYAAIRALHIIEECEVHFPETGRNGRSREQDIADGRWDPRWNGRKNFKRFRKQGEPVGRQPPRIIIPLEEVKPKEYGIGDDYWLEDDSGRRKEDNRPGSQNQTQQSSEGRSGSLGMGKEKEVAPRPAIRRTILAIDSSDEEERSELSGMPEDSALPESEPPRSRAAKAAEKANSQRARSQTHTQSQSQAGSSHKRPAPVDSNQEGAAKRPRRGLGPPSDDDSDDSDDELKFRFGRRR

SEQ ID NO: 4374 - DNA, 1665 bp, Myceliophthora thermophilia
atggagtctagcggcaacgagaactccacacccagcaacgcgagcgacgtcgcggaccgtcccgacctattagagaagggggtcaatgcggccgatccgaaatctccggaagccgaaccggaagagaagcgggcgatgaccggcttccgctggttcgccttcgtcgtgagcaccctgaccgccatcttcgtctactcgctcgataacaccgtggtcgccaacattattcccatcatcgtcaatgatctcgatggcatcgagaaactgccatggctgtccgttggcttcatgattggtggtctggctgtcatcctcccgatgggcaagctctacgccatctacaatccgaaatgggtctacatcgtttcgttcatcattttcctggctgcatctgccctttgcggcgcagcccccacgatggaggctgaaatcgtaggccgtgtctttgccggcgccggcggcaacggcatctactacggactgctggcgctgctgtcgatgcacaccacaaccaaggagcgtccgcagtatctcagctacactggcctcgtctggggtctcggcaccgtgctcggccccgtcgtcggcggtggtttcgccctctacgactggcgctggggcttctacatcaacttgctctttggtgccatcctcctgcccgcctacctctgggcgatcccctccaccgccgccatgcccgacaagacgcagtggcaaaagcttgtcatgctcgactggccgggcatcgttctcagcgtcggcgccatggtgaccctcgtcattgccatcaactttggcggcgtcgactgggcttggggcagcggcgccagcattgcgctcttcgtcgtctcgggcgtcctctggatcgccttcggcgtccagcagactttctgcatctttaccgacaaggagaagcgcctcttcccctcccacctgcttcggcagaggatgccagtacttctgtttgtcgcctgcgcctcggtcgcttccgtcgcctacacctcagtctactacatcccgctctatttccagttcacccggggcgactcggccatttacaccgctgtccggctgctgccgtacatctgcgttctcatcaccgccatgccccttagcggttggtatctctccaactacggatggtacaagccgctctatatcggcgggagctccatcgccctcctcacctccgccctcatggctcactacgtcgaccgcgagaccgctgttggcatcttctacgttatcgagctattcctgggcggcagcaccggcgcctacacgcagtcttcctttgccgtcatccagtctgccgttccgcccgccgaagctgggaatggtcttgccttgatgctcatctcccagctaggaggcatgaccctcggtctctctatcagcggtgccgtcttcgtcaacacggctgtccggaacctcgaagcagccatcgaccttccccgccatgagctcacgcagctcgttgctggcgcctcgaacaaccttctcgaaaccttgtcccccgccatgcggatccagatcctggacatcattgtcgagtcgtggcggaaggctttcatcatcatttacgccggggctgcggctagtctggtggcagccatctttttccggaacggaaaagccaacgttgtggctgccggcggtctgtag

SEQ ID NO: 4375 - protein, 554 aa, Myceliophthora thermophilia
MESSGNENSTPSNASDVADRPDLLEKGVNAADPKSPEAEPEEKRAMTGFRWFAFVVSTLTAIFVYSLDNTVVANIIPIIVNDLDGIEKLPWLSVGFMIGGLAVILPMGKLYAIYNPKWVYIVSFIIFLAASALCGAAPTMEAEIVGRVFAGAGGNGIYYGLLALLSMHTTTKERPQYLSYTGLVWGLGTVLGPVVGGGFALYDWRWGFYINLLFGAILLPAYLWAIPSTAAMPDKTQWQKLVMLDWPGIVLSVGAMVTLVIAINFGGVDWAWGSGASIALFVVSGVLWIAFGVQQTFCIFTDKEKRLFPSHLLRQRMPVLLFVACASVASVAYTSVYYIPLYFQFTRGDSAIYTAVRLLPYICVLITAMPLSGWYLSNYGWYKPLYIGGSSIALLTSALMAHYVDRETAVGIFYVIELFLGGSTGAYTQSSFAVIQSAVPPAEAGNGLALMLISQLGGMTLGLSISGAVFVNTAVRNLEAAIDLPRHELTQLVAGASNNLLETLSPAMRIQILDIIVESWRKAFIIIYAGAAASLVAAIFFRNGKANVVAAGGL

SEQ ID NO: 4376 - DNA, 1077 bp, Myceliophthora thermophilia
atggcattctacacttccaaccgaaaccagcccgttcgctctcgcccatcggagctcgacctctccccaacatcctcccgctccgccaccccgccaggcaccgcttcgtccagctcctccacatttctcacctcctccgtctctagcctctggggcggtttcatgcgccgcttctcaagcgaaccatcggcggcgacgtcaaatcctcctggaatgccccacgcacgcacatttcaagcagacggcaggaacaagcagcaacaccaccacggccaggggaacggcgttgacggcgtatacactcccccacacatcctccaggcccgccgcacagcatcgccaatgcgcccaccgccgctggagcccttgcgtctgtccgggttctcggaggacacgagaccggatgcccggctgctgaccgcgccgatcgcagaagagatccggatcatggtgccggcccggctgggaatcgtggacgagtggaagctggtgtacagtctcgaacaggacggcgctagcctagcaacactatacgagaaatgcgcgcagtaccaaggtgtgagggtaggattcgtgctctgcgtgaaggactgtgatggcggtctctttggcgcctacctctccgattacccgcacccagcacccaagtactttggcacaggtgaatgcttcctctggcgcgcctcggttctctcccgtcctcccccgccgccctccatcatcgacaacgagagcagcggtaactccaacctccgaacaaccaccatccgcgccgcctctcctgccccaaggaatgccaacatcactcctaattcgagaagcccatctcgcaccccaacaccgcaaccgatccgctttaaagcattcccctactcgggcatcaacgagtactacatgctctgcgagccgcatttcctctcgctcggcgcaggcgacggcaaatacgggctatggctagacgactcgctcgagcggggcgtcagcgcgacgagccagacgtttgggaacgagccgttaagtgacgagggtgagaagtttggggtcttgggagtggaagtttgggtgatcggtgcctaa

SEQ ID NO: 4377 - protein, 358 aa, Myceliophthora thermophilia
MAFYTSNRNQPVRSRPSELDLSPTSSRSATPPGTASSSSSTFLTSSVSSLWGGFMRRFSSEPSAATSNPPGMPHARTFQADGRNKQQHHHGQGNGVDGVYTPPHILQARRTASPMRPPPLEPLRLSGFSEDTRPDARLLTAPIAEEIRIMVPARLGIVDEWKLVYSLEQDGASLATLYEKCAQYQGVRVGFVLCVKDCDGGLFGAYLSDYPHPAPKYFGTGECFLWRASVLSRPPPPPSIIDNESSGNSNLRTTTIRAASPAPRNANITPNSRSPSRTPTPQPIRFKAFPYSGINEYYMLCEPHFLSLGAGDGKYGLWLDDSLERGVSATSQTFGNEPLSDEGEKFGVLGVEVWVIGA

SEQ ID NO: 4378 - DNA, 2331 bp, Myceliophthora thermophilia
atgcctccctcgtttctgagcttgaaggagttgcgaagacgatcacgggcgagcttcaaaaccgaacgctccacagacgaatcgagcgaagctagcaaccatacaaccccaaccaatggctcattgacacccccttcgataggagcagaatcggacccggccttaaatctgcaattcaaagaccaaccgcaatcacaatccgctccacctactgcagtcgcgaggccgcagcctcacccccttccaaatgccagtaaccgtttcagtgtttcgggcatgatcggtctgggatcaccagtcccggctggaaggggtccaagcctgcccatttcgcattattctcctcggataagtaatgtggcagatggctcgtgggtctaccaaaaggttctactcgtccacggcaccattggcgagccatttcatccgtcacttgacggcacgcttaccgtgagccgcctcgacgaccactttcccccgatttcatggccagtgcacaattcttgcttcaaagcactggtatatctgttgcccggggccaaccgctttcggttcgacttttctagcccgaagctcgccaacagcggatcttccaaccctatccacagctctcatttgacagttcacatgatcccccctgccggggcacctcctctgcaactagcgattcttttggcaaaagactcccccggtacattcgacgcagtaccggcgcgggtcgaaagggaagggaacgggttggacacggcgattcgcaagttccgcatggcagcctacctctggcaggcgtttacggctgagcagatgtcgcgcaacaagcttgggcgacgtaccttcaggttcgaagaggaatggacgacgggctcggcaaacctccgagacagacagactggtaccctccgatccgaagcgcgagtgcatgtcattcggaccgagaagaccttagcggagctccgtgatatcaatctggcacagcaaaatactaacgccacggacgcagggggcctttatggtattacggcagatgctgtgcgcgattacttcaaaccgctcccgggacaaaagttgtacgtgtccgtaatgctgctagatgcgcattgggataaagactcgaagacaattgtcgggcatgctgccctcggcggacaggtcggcgatttgcaccttggtatctttggatctcactgcctccagagctacccaacatgcttcgaagaggtagtaccggcctttacggattgtacgccgaccgacaccaactacgtcggcaacgactgcaatgacgccggatcctcctgggaagctgctaatataggcattggcgcccacctgcacgaggttgggcacctcttcggtttgccccatgaagaaagcggcgtcatgctaagagactacgtaaaactcaaccggacctttctcactcgcgaggcctactccacaagaacgcgttcgaggggcggatttgtctctcaagaagatgagtgtacctggcatcggctcgattgccttcatttccgcagccatccctgcttccgcctccccaacgaccccgtgcttaacccggatgacagcgtccagggctggcccatggaaaatgggactctgaccgtcacagctgcaacaggcgttgcctacgttgagatctacggcgagggtgatgacgtgtgccacgcctgggtcgagtaccagcctgagaacggcgggccagtgctgaggtctgtctcgctgagtgagcatgacttgcgagctaggctgccagagggcaagcggaagggcgtactacgaatctcggtcaagtcatacggcggcgggtccttggttgtagacgacttcagcaagctctgctccaaagaggcagcttgcctgagacttcctagtgcgatgcccggtttgcccaagatggcgttccgggggaagaagctgggcttgtcgcagatggagggctcggaagcccacgaagttgtattcacaagcgcgctcaagcacgatcgagtactgtccaaggtgatagtatatcatggcttggcggtagacgggatggagttcgtctatgatgacgattcgaggcaagtgtttggtaaaaaaggaggcaaagcgggcggtgatgtatttgatatggacatacgccggggcgagtacattacgggcttcttcgttcgctctgggttctggatcgatgctatccaagtattgaccagcctgggcaggaggagtccgttgttcgggaatcctcacggcggtgatccgtatgttctcggtcctgctcttcctgatgttttactcttgctgactggttctcaggcataccttaatacctccgagaggctataa

SEQ ID NO: 4379 - protein, 776 aa, Myceliophthora thermophilia
MPPSFLSLKELRRRSRASFKTERSTDESSEASNHTTPTNGSLTPPSIGAESDPALNLQFKDQPQSQSAPPTAVARPQPHPLPNASNRFSVSGMIGLGSPVPAGRGPSLPISHYSPRISNVADGSWVYQKVLLVHGTIGEPFHPSLDGTLTVSRLDDHFPPISWPVHNSCFKALVYLLPGANRFRFDFSSPKLANSGSSNPIHSSHLTVHMIPPAGAPPLQLAILLAKDSPGTFDAVPARVEREGNGLDTAIRKFRMAAYLWQAFTAEQMSRNKLGRRTFRFEEEWTTGSANLRDRQTGTLRSEARVHVIRTEKTLAELRDINLAQQNTNATDAGGLYGITADAVRDYFKPLPGQKLYVSVMLLDAHWDKDSKTIVGHAALGGQVGDLHLGIFGSHCLQSYPTCFEEVVPAFTDCTPTDTNYVGNDCNDAGSSWEAANIGIGAHLHEVGHLFGLPHEESGVMLRDYVKLNRTFLTREAYSTRTRSRGGFVSQEDECTWHRLDCLHFRSHPCFRLPNDPVLNPDDSVQGWPMENGTLTVTAATGVAYVEIYGEGDDVCHAWVEYQPENGGPVLRSVSLSEHDLRARLPEGKRKGVLRISVKSYGGGSLVVDDFSKLCSKEAACLRLPSAMPGLPKMAFRGKKLGLSQMEGSEAHEVVFTSALKHDRVLSKVIVYHGLAVDGMEFVYDDDSRQVFGKKGGKAGGDVFDMDIRRGEYITGFFVRSGFWIDAIQVLTSLGRRSPLFGNPHGGDPYVLGPALPDVLLLLTGSQAYLNTSERL

SEQ ID NO: 4380 - DNA, 1818 bp, Myceliophthora thermophilia
atgggttcaacagcgtacgcggcttacaagaatggcgtcgcgaataccggcagcgagcacacagtgacggcgatgggacgatggtctatactcgacaagcagctgcctcccgccgacaaaatcaaggcaatccacgtctacgactttgacaatacgctcttcaagacgcctttgccaaaccccaagctgtggaatggacagacgattggaacactgtcgaaccccgatgctttcgtcaacggcgggtggtggcacgattcacgcattcttgccgcaaccggcgagggtattgacaaggaagagccgcgcgcgtggaatggttggtggaatgagaagatcgtcgagctcattcacctcagtaacaaacagaaggacgcgctctgcgtccttctcacgggccgttcagaatctggcttcagcgatctgatcaagcgcatggttgctagtaagggtcttgagtttgacctgatctccttgaagcccgccgtcggcccaaacaacgagcgcttcgccaacaccatgattttcaagcagacgttcttggaggctctactggagacataccggcatgctgaagagatccggatatatgaagacaggataaagcacgttaagggctttcgtgattttctcgacgagtacaatctcaagaagctaaacggggtaggtggcccggccgcgcgaggaaccattaatggcgaggtcattcaggtagccgatgtggccacctacctcgaccccatcgttgaagtggctgaagtacagcagatcatttcagagcataatgccgccgtgtctaaacgacggcgtggcaacaagggcgagcgcctggccatcaagaagaccgtcttttacacaggttacatgatcaacaacgccgacacccagcggctgctcacgtttgcacaaacgcctcaggatttgcccgagggtgaactcaagtttcacgcgaacaacatcatgatatgtccccgaccctgcccaccagctatcctcgagaaagttggcggcataggaagcaagatgacctgggaagtaaccggtaccgccaaccacgaaaacaccatctgggcggtatgcgtcaagcctgtcccagaaacagccagttttcacactggggacccggttccgctagtggtgcttgccttacgcaaaggtgcccgccacgctgaggccggcaagatacagaagtggcagcccgtaccgccggataaggcgtttcgcttcgaaactactgtcggtgaaaagatcttgttacgcatcgagcccgagggtttccaaaatttggtcgacggtccgttccaccacggcaaagcgctcaacagcaagcgaaagcacacggccgcccaagacgacttccgctcgcggccctcgggcggcgtccagcaacagcaccggcaattccaccatcaggccaactataccggtggtggtggcggcggtggccgtggcgggggcgccggcagaggtaactttcgcggtggcggcaatatgaatcgcggattcagaaaccagcgcagcggcgcggctaagggcggccgtggcggccgcggtgggcatggcggagggcatcactacaagtcgttggacgatgtcggcgggcgggatacccaatctgtgggcttcgcgcagatgtacgaggacgacccgcagcgcttcccgccggatcaaaatatccccaagggtccgtcaaatccagcaaacccagggttctacaatggtctacagcatcaggttcaacaacaacaacaacggccagggaatgggtattctgggcccggtgctggtggtaataccgagctgaataacttctactga

SEQ ID NO: 4381 - protein, 605 aa, Myceliophthora thermophilia
MGSTAYAAYKNGVANTGSEHTVTAMGRWSILDKQLPPADKIKAIHVYDFDNTLFKTPLPNPKLWNGQTIGTLSNPDAFVNGGWWHDSRILAATGEGIDKEEPRAWNGWWNEKIVELIHLSNKQKDALCVLLTGRSESGFSDLIKRMVASKGLEFDLISLKPAVGPNNERFANTMIFKQTFLEALLETYRHAEEIRIYEDRIKHVKGFRDFLDEYNLKKLNGVGGPAARGTINGEVIQVADVATYLDPIVEVAEVQQIISEHNAAVSKRRRGNKGERLAIKKTVFYTGYMINNADTQRLLTFAQTPQDLPEGELKFHANNIMICPRPCPPAILEKVGGIGSKMTWEVTGTANHENTIWAVCVKPVPETASFHTGDPVPLVVLALRKGARHAEAGKIQKWQPVPPDKAFRFETTVGEKILLRIEPEGFQNLVDGPFHHGKALNSKRKHTAAQDDFRSRPSGGVQQQHRQFHHQANYTGGGGGGGRGGGAGRGNFRGGGNMNRGFRNQRSGAAKGGRGGRGGHGGGHHYKSLDDVGGRDTQSVGFAQMYEDDPQRFPPDQNIPKGPSNPANPGFYNGLQHQVQQQQQRPGNGYSGPGAGGNTELNNFY

SEQ ID NO: 4382 - DNA, 345 bp, Myceliophthora thermophilia
atgggaatctttgcgaagcgcaccaaaacaaaaacgcgacggcgagttcgcgatctcgaccagattaaggccgacctcacgtcacccaggcacctacaactgtacaaggagaccaaggccgctgaggacctgccgggctttggccgccattactgcattgaatgcgcaaagtggttcgagaccgagacgagtctggtcgctcacaggaaaggcaaacctcacaagaggaggctcaagcagctgaaagaagggccttacactcatgaggaggcggcagctgcgatagggttcaggacggacaacgggcctcaaaagacaaggtctcaagatgttgagatgtcatga

SEQ ID NO: 4383 - protein, 114 aa, Myceliophthora thermophilia
MGIFAKRTKTKTRRRVRDLDQIKADLTSPRHLQLYKETKAAEDLPGFGRHYCIECAKWFETETSLVAHRKGKPHKRRLKQLKEGPYTHEEAAAAIGFRTDNGPQKTRSQDVEMS

SEQ ID NO: 4384 - DNA, 954 bp, Myceliophthora thermophilia
atggccacccaaataccctccctcccggagacggagcggctcgcaccggcctgcatccgcatcctcggcggcaatcccggcaagtttaccctccagggcaccaacacctacctgctcggcaccggtccctcgcgcatcctcatcgacacgggcgagggcaggccatcctggctggccacgctgcggcgcgtgctgagcgaggagcgcgcgtccctcgcgtgcgcgctcgtcacgcaccggcaccacgaccacacgggcgggatcgccgacctgctgcgggcctggcccggcaccgccgtgcacaagcaccgtccggagcccggggccggcctgctggacatcgcggacgggcaacggttcagcgccgacggcgttacgctcacggccgtgcacacccccggccacacggaggaccacatggtgttcttctgggaggaggagaacgcgctcttcacgggggacaacgtgctcgggcatgggacgagcgtgtttgaggatctgggcctgtacgtggccagtctggaacgaatgcgcgggctcttctcccccccggagaaggcgggaagcaaggagccggtcgcgtaccctggccacggcgccgtggtgagcgacgggccgggcaagatcgacgagtatatccggcatcgggcgcagcgggagatgcaggtcctgcaggcactccgcggtgatgacggggacggggacggggacggggacagggacagggggaaggtgagagatgaagatggaaagggaaacggacacagcgatggctggacggtcatggagctagttcggagtatctaccgagacgttcccgaaagcctgcacccggcagctgccggcggcgttgtacagattttgcagaagctgcagcgggaagggaaggttgaagcggtgggaagcggagagaggtggaggcttgcctggggctcaggtcggtccgctttatga

SEQ ID NO: 4385 - protein, 317 aa, Myceliophthora thermophilia
MATQIPSLPETERLAPACIRILGGNPGKFTLQGTNTYLLGTGPSRILIDTGEGRPSWLATLRRVLSEERASLACALVTHRHHDHTGGIADLLRAWPGTAVHKHRPEPGAGLLDIADGQRFSADGVTLTAVHTPGHTEDHMVFFWEEENALFTGDNVLGHGTSVFEDLGLYVASLERMRGLFSPPEKAGSKEPVAYPGHGAVVSDGPGKIDEYIRHRAQREMQVLQALRGDDGDGDGDGDRDRGKVRDEDGKGNGHSDGWTVMELVRSIYRDVPESLHPAAAGGVVQILQKLQREGKVEAVGSGERWRLAWGSGRSAL

SEQ ID NO: 4386 - DNA, 1524 bp, Myceliophthora thermophilia
atggcttcggcgcaggtcgtgaacaactccaccggggaaacggctcttgagagtggtgaagcggcgtcttctctccccgttcgtcggtccggccgcgcacgcaagaggccttccggccatggtgaggattccgactacaaaaacgggaaggtagcggcctcgcctgtctcatcggattcccggcgcaacccaaagcgacgggcggccccggacgctttcaacgtgcccgagcacctgctcgaggcatctctaggaccgtggaaggagaatgagcagtctgagtggccaagttgggtcgaattggaatctgacccagcatttttcacggctataatgggtctgcttggcgtcaagggagcaagaatagaggaagtgctctcggtcgatgaagataccctggccactctgccacctccagtacatggactggtatttttatacgagtatgtcgccgaccagagccctgaggtcacctacccgggccacgatgtgtggttcgcaaatcagaccacacataacgcctgtgccaccattgccttgctcaacatcatcatgaacgcagagcgactgagtcttggtgagaagctccgccatttcaagcaggaatccaaggacctgtcgccaccacttaggggaaatatgatcaacaacagcacctggatacgagttgcccacaactctttcgctcgacggttagatcttcttgacgccgcgctcagtctccagaacgaggtcgataacaaggaaaagagggcgagatcatcagctgccatgcagcggcggagaaagaaaaagcccaagaaagaaagggtcaaagctggcaaatccggcgatactcccgcctatcacttcatcgcctttgtgccagtcggacaacaagtctggcaactcgacggcctctcgtcggcgccccacgaagagggcaaacactggacctcagtgatgcgccccgtcctccaggagcgcatgatgcggtacgagacggagcggttgtccttcagtcttcttgcattatgcggcgataatctcgcacacgtccggcaaaaactcgctgccaacatccgcagcttggccgatctcgacagaaacttcggcgacaacccaaactggccgtcaaaaacttccggtcatgacaccatctacattccgaccgacgcacggctctcggcctttcagctcgatgcggaagatattcaagctgtaccggacagcgagctcagactctcgctccctcaaaaacagcagcagaatttacactcctcccccgctcccgacgacaatgatgcctctggaatgacaactgttgaggcagctctagagctctgggtccagctcagcgcagagcaaaagcggattctcgcggaatacgacaatgagagaaaagtggaaaatggccaggaacctactgctatcctggggcgcgccagggattacacggctgctattcacaagtgggtggaaaagctggctggtcaccgggttttacagaggctgcatcaggaggtgcagctgcagaagtcgtaa

SEQ ID NO: 4387 - protein, 507 aa, Myceliophthora thermophilia
MASAQVVNNSTGETALESGEAASSLPVRRSGRARKRPSGHGEDSDYKNGKVAASPVSSDSRRNPKRRAAPDAFNVPEHLLEASLGPWKENEQSEWPSWVELESDPAFFTAIMGLLGVKGARIEEVLSVDEDTLATLPPPVHGLVFLYEYVADQSPEVTYPGHDVWFANQTTHNACATIALLNIIMNAERLSLGEKLRHFKQESKDLSPPLRGNMINNSTWIRVAHNSFARRLDLLDAALSLQNEVDNKEKRARSSAAMQRRRKKKPKKERVKAGKSGDTPAYHFIAFVPVGQQVWQLDGLSSAPHEEGKHWTSVMRPVLQERMMRYETERLSFSLLALCGDNLAHVRQKLAANIRSLADLDRNFGDNPNWPSKTSGHDTIYIPTDARLSAFQLDAEDIQAVPDSELRLSLPQKQQQNLHSSPAPDDNDASGMTTVEAALELWVQLSAEQKRILAEYDNERKVENGQEPTAILGRARDYTAAIHKWVEKLAGHRVLQRLHQEVQLQKS

SEQ ID NO: 4388 - DNA, 2220 bp, Myceliophthora thermophilia
atggcatcaactacctatttcggccgcgccgagcgcgacggctgtcatcttggcgcggatttcgatcttcttgccaaatgggctcgtgcctgctctctcgaccatccggttcactcgtactacctaacgcagctctccaacaaggatcgggcgcaactgttcaccggccctgccaaagaatttcatctgaaacagggcccggacaacacggttaaactcgagacacttcaagacgaagtgaatcgtcttgaccctgaagtcatcgatatgattcgatcaaccaactaccggcgatcagaagcacgcctccttgaattattaaacgagattgaggacgcacaacccaaggcggacagcgcggcagctctggttctctcgaaagcgctttcgcggggagtggatcccttgactgctgagaaagctgcaaatcaactgtccgacaagattctggactacgcgggtcacaaagtcaaagctcgctggaaggctgcaagggacgaacggctgatgggcttcaacgaccagactccgggctcgcccaagcaggtcaaccccacgcccaagaacggttctttcaacaacgcggtagatgaatcaaacaccagcgacacgggtgattcgagtattggtaaacgctcgaccagaaggaagcgagtgaagggcgtggccctcaacacctcttttcgccgattcgtcaatcccactttggcagatcatctgttaagcaagccggctgctaataatgctgatggaaacaccgcgttcaatactcaccctggcgacgttggagataaccacagcgctcctcagcagaaaattgctgccgagtctatatcacccaacagctccctcccggattatggtagtgaaacatctgccgattccgcttattggaacagtccgccttgttctgctggcgagagcccgtcctcgccggacattgattctgagactgcttttttcgaagaagcagatggtggtgtcacgcttcttcccactagccttgccgaggagctgggtttcaaggatgaatccggtgttgcgactccgatccctgcgttacgtttcgatcgcttcggcaatggagcctcgagcggccaccttggcgctggcctggatcaagctttcattgctgttccatccagttttaatggtttgccggcctctaacactcttgtcaatgcgtccaacctttcggctgcagttggtccgttgagcgcacacaccgctcaggttatcgacactgctgtccgacacaacatcaaggtcgaagcttcgtcttgtccgttcttgccaaactccaagatcaaagacaagtacccgctggccaaagaacagccttggatgggttttaggtgctacgaagttaataccaatctgggcaataaccagctggttcccaagtactggaccaccaaacgtgggaaggagcgctaccttcgccataagattggcgacctgaagctggacgacgccaagctgcgctccgatcgtattttgggcactgtcgctcgtaaccccatacacattttcatcgatctttccaacatcatcatcggtttctacgacagcatgaaggagagccgcggtctctccatcaacaagcgagtcatggccccagcattctcgttcaagaattttgacacgatcctcacccgcgaccgaaatgttgccaagaggatcgtggcaggttctttgaccaactcgtacaacaagcgttggcctggatacatgattcaggctcaagagctgaagtacgagatgaatatcctcgagcgcgttcccaagcctgcttcttcgcctgtgcgcaagcgcaaaccgaaggctggaccccgtgacgcggatgcttctacgtctggacatgacacttcaggcgaggagtgttttttcgggccaatgaaacatggtgagcagggtgttgacgagctccttcacctaaagatactccagagcgccatggatactcccagccctgcgaccatggttctcgctactggcgatgctgcctcagcgcagtactctgatggtttcaagaagaacatcgagcgggtgcttgcgctcggctggaacattgaactgtacggctggagccgcaacatctcgtcagcttggcgtgaacctgattttgccgagaaatgggaacaccagttcaagatcattgagctcgacgagttctgcgaggagctttttgacatgaccatcgagtcattggagcagtaa

SEQ ID NO: 4389 - protein, 739 aa, Myceliophthora thermophilia
MASTTYFGRAERDGCHLGADFDLLAKWARACSLDHPVHSYYLTQLSNKDRAQLFTGPAKEFHLKQGPDNTVKLETLQDEVNRLDPEVIDMIRSTNYRRSEARLLELLNEIEDAQPKADSAAALVLSKALSRGVDPLTAEKAANQLSDKILDYAGHKVKARWKAARDERLMGFNDQTPGSPKQVNPTPKNGSFNNAVDESNTSDTGDSSIGKRSTRRKRVKGVALNTSFRRFVNPTLADHLLSKPAANNADGNTAFNTHPGDVGDNHSAPQQKIAAESISPNSSLPDYGSETSADSAYWNSPPCSAGESPSSPDIDSETAFFEEADGGVTLLPTSLAEELGFKDESGVATPIPALRFDRFGNGASSGHLGAGLDQAFIAVPSSFNGLPASNTLVNASNLSAAVGPLSAHTAQVIDTAVRHNIKVEASSCPFLPNSKIKDKYPLAKEQPWMGFRCYEVNTNLGNNQLVPKYWTTKRGKERYLRHKIGDLKLDDAKLRSDRILGTVARNPIHIFIDLSNIIIGFYDSMKESRGLSINKRVMAPAFSFKNFDTILTRDRNVAKRIVAGSLTNSYNKRWPGYMIQAQELKYEMNILERVPKPASSPVRKRKPKAGPRDADASTSGHDTSGEECFFGPMKHGEQGVDELLHLKILQSAMDTPSPATMVLATGDAASAQYSDGFKKNIERVLALGWNIELYGWSRNISSAWREPDFAEKWEHQFKIIELDEFCEELFDMTIESLEQ

SEQ ID NO: 4390 - DNA, 1062 bp, Myceliophthora thermophilia
atgtccgccgacttctgggccggctacatctccggcgccgcgggcatcattctcggcaacccgctcgacgtgctcaaagtccgcctgcaagccggcctcaccgctaccccgccatccgccgccgctccggtgacaccgacaccagcatcctccagctatgtccgcccttttctcctcggcaccgccgccccagtcctcggctacggcgccctcaacgcactcctctttgtctcgtacaaccgcaccgaagcattcctcaaccagctgaccggaaccaccagcgacggtcaaggacgcggcacaaacctcgcgacgacctggctggccggcgccgtcggcgggctcgccacatgggtcgtctccaccccgaccgagctcgtcaagtgccgcgcccaattgcagatcccttcttcccaggctctcgcgtcgctgggaagggcaggggcaggggcaggggcaggggcaggggtatcctccctcgcgatcaccagacatatcctccgcaccactggcctccgaggcctctactttgggggcaccgttaccgctctccgcgacagcatcggctatgggttctacttctgggggtatgagctctgctcgcgcttgacgccttctcttggcccctttgagctagaaagcggggacagcaccggggggtctgccaggagcgacgccatgcgcgtgctcctatgcggcggcctcgccggcatcatcacctgggcgagtatttttccgctcgacgtggtcaagacgagggtgcaggcgcagcagttgcctctggaccaaagtggcttgtcaagcgacagagcgccactgcttggcggggaagagcgggctagcgttgcaggaacgaagacgctgggagcgtggcaggttgcgaaagaggcgtaccgggagggaggggtgcgcgcgttatttcgggggctgactgtttgcagcatcagggcctttattgtaaatgccgtgcaatgggcggtgtatgagtggatcatgatggagcttgggcaggggagggaaaagcaaggggtcaaggacgacttacgggctgttgctgattag

SEQ ID NO: 4391 - protein, 353 aa, Myceliophthora thermophilia
MSADFWAGYISGAAGIILGNPLDVLKVRLQAGLTATPPSAAAPVTPTPASSSYVRPFLLGTAAPVLGYGALNALLFVSYNRTEAFLNQLTGTTSDGQGRGTNLATTWLAGAVGGLATWVVSTPTELVKCRAQLQIPSSQALASLGRAGAGAGAGAGVSSLAITRHILRTTGLRGLYFGGTVTALRDSIGYGFYFWGYELCSRLTPSLGPFELESGDSTGGSARSDAMRVLLCGGLAGIITWASIFPLDVVKTRVQAQQLPLDQSGLSSDRAPLLGGEERASVAGTKTLGAWQVAKEAYREGGVRALFRGLTVCSIRAFIVNAVQWAVYEWIMMELGQGREKQGVKDDLRAVAD

SEQ ID NO: 4392 - DNA, 3657 bp, Myceliophthora thermophilia
atgcagtcctcctcgggaatgctcacaaagtttgagtccaagtcgtcgcgcgcaaagggcatcgcattccaccctaaacgaccatggattctcgtctcccttcactcgtccaccattcagctgtgggattatcgaatgggcaccttgattgaccgattcgaagagcacgatggccccgtccgcggcgtcgattttcacaagacgcagccccttttcgtttcgggaggcgatgactacaagatcaaggtctggtcgtaccagacacgccgctgcctgttcacgctaaatgggcatctcgactatgtccgcactgtcttctttcaccacgagcttccttggatcgtcagcgccagtgacgatcagaccattcggatatggaactggcaaaaccgctccctgctttgcaccatgacaggccacaaccattacgcaatgtgcgctcaattccaccccaaggaggatcttgtcgtctcggcctcgcttgaccagtcagtccgggtttgggatatctctggccttcgcaagaagcactccgctccgacctccatgtcgttcgaggaccaagtctcccgcgccaatgcaaaccagaccgacatgttcggtaacacggatgccgtcgtcaaattcgttctcgagggccacgacaggggcgtgaactgggttgctttccatcccacgatgcccttgatcgtctccgctggagatgaccgtctgatcaagctgtggcgcatgagcgagaccaaggcttgggaggtcgatacttgcagaggtcacttccagaacgctagcggctgtctgtttcacccacaccaggatctcatcctgtccgcaggagaagacaaaaccatcagggtctgggacctgaacaagcgcaccgctgttcacactttcaaacgcgagaacgaccgcttttgggtcatcgcagcccatccggaaattaacctcttcgctgccggccacgataatggtgtgatggtgttcaagcttgagcgcgagagaccggcttcagccgtgtaccagaacaacttgttttacatcacaaaagacaagtgtgtcaagtcttacgacttccagaagaacattgaatcgcccacacttctatccctcaagaagctgggcagcccctgggtaccaccccgcaccctctcttacaacccggccgagcgctcaatcttggtcacgtcatcggcagacggcggcacctacgagctagttagtcttcctcgggacggctctggagcgatcgagccggcagagtcgaaacgcggccagggcaactctgccatcttcgttgctcgcaaccggtttgcggtcctgaacacgtccacccagacggtggatatcaaggacctaaccaacaacaccacgaggtctttcaagcctcctgttgggaccagcgacatttactttggaggaaccggcaatctcctcattatcacacctaccgccgtccacctttacgatatccaacagaagaaaacggccgcagagcttgctgtcaatggcgtgaagtacgtggtgtggtccaatgatggcctctatgctgcgctgctcagcaagcacaatgtcaccattgtgacgaagactctggagcaggtcagcacccttcacgagactattcggattaagagcgccacgtgggatgatgcgggagtgctcctgtattcgactttgaaccacgtcaagtacaccttgctcaatggcgacaatggtatcgttcggaccctggaccaaaccgtgtacctcgttcgcgtcaagggccgcaatgtgtattgccttgaccgcgccgcgaagccgaggatccttcagatcgaccctactgagtaccggttcaagctcgcgctcgtgaagaggaactacgaggaaatgctccatatcattcaaaactccagcttggtcggccagtcgatcatctcatacctgcagaaaaagggttaccccgagatcgctctccagttcgtgcaggaccctgctacgcgctttgagctggcaatcgagtgcgggaatctggaggtggcagtcgaggtcgccaagcaactggaccgccccaagctttggacgaggttgagcaccgaggcgctcgctcatggcaaccactccgtggtcgagatgtgctaccagaaactcaagcactttgacaagctctcgttcctttacctgacgacaggcgacaatactaagctgtcaaggatggccaagatcgccgaacatcggggagacttcacttcgagattccagaacgcgctctacctgggagaggttgaggataggattcaaatgttcaaggaaatcgatttataccctcttgcatacatgacggccaaagcccacggcctggaggaagaggttcagtccatcctcgaggctactggcctcacagaagaccagctcaatcttcctaccttcggcaagccgctcaccccccccagtcccgtcgtaccgacgtaccaggccaattggccgactaaggcgacctctcagtcgttctttgagaaagcgctcctcggccaggttgagggcctttcgctcgaagacgaaccggccgcggccaacggtcttggcgaggcagaggaagaaggcactgcgaagcgggatacgctcggtgaagccgatgaggatgaggatgccgctggctgggacatgggcgaggacatcgtcgccgaggttgaggagggctttgtcaacgtggagagcgccgacgcgggcggtgcgggcagcagtgaggcagacctgtgggcccgcaattccccgttggctgtcgaccatgtcgctggcgggtctttcgagacggccatgcaactgcttaaccgccaagtcggtgccgtcaactttgcgccgctcaagccccggttcttggaggtttaccaagcctcgaagacctacctacccgcgtcggctggtctaccgccgctcgtcaactatgtccgccgcacagtcgaggagactgatccgaggaaggttctcccaattattccaagagacttggaatatttggcgtccaacgacctgcagcggggttacgacgcgatgaaggctaacaggctggaggacggtctgagaatcttcaagggcatccttcacgcggtgctgatcaacgccgtaggcagtgacagcgaggtggccgaggccaagaagttgattgcctcggccagcgagtatgccgttgccatgtcgattgagctcgggcggagagcgctcggctctcctgacacggtcaaccaggatcctcaactgctgaagcggagcctggagctgtcggcctactttacgattcccaaaatcgaggtgccacatcgccagctagccctgctcaatgccatgaatttggcgatgcgcagcaagaactacaactcggcgttgagttttgccaacaggatattggctaacgggggggcgaccaggatcctggagagtgcccgtcggaccaaggctcaatgtgagcgcaacccgaatgacgcggtcgagattgagttcgatcagtttgccgagttcgacatctgtgcagccagccacacaccaatttacagcggcaccgcgtatgaggagtgcgcgtttgacgggtccaagtaccacaccaagtacaagggcacagtttgcgtcgtgtgcgaggtctgcgaggttggcaagcacggaagcggcctcaagctgttcgcttga

SEQ ID NO: 4393 - protein, 1218 aa, Myceliophthora thermophilia
MQSSSGMLTKFESKSSRAKGIAFHPKRPWILVSLHSSTIQLWDYRMGTLIDRFEEHDGPVRGVDFHKTQPLFVSGGDDYKIKVWSYQTRRCLFTLNGHLDYVRTVFFHHELPWIVSASDDQTIRIWNWQNRSLLCTMTGHNHYAMCAQFHPKEDLVVSASLDQSVRVWDISGLRKKHSAPTSMSFEDQVSRANANQTDMFGNTDAVVKFVLEGHDRGVNWVAFHPTMPLIVSAGDDRLIKLWRMSETKAWEVDTCRGHFQNASGCLFHPHQDLILSAGEDKTIRVWDLNKRTAVHTFKRENDRFWVIAAHPEINLFAAGHDNGVMVFKLERERPASAVYQNNLFYITKDKCVKSYDFQKNIESPTLLSLKKLGSPWVPPRTLSYNPAERSILVTSSADGGTYELVSLPRDGSGAIEPAESKRGQGNSAIFVARNRFAVLNTSTQTVDIKDLTNNTTRSFKPPVGTSDIYFGGTGNLLIITPTAVHLYDIQQKKTAAELAVNGVKYVVWSNDGLYAALLSKHNVTIVTKTLEQVSTLHETIRIKSATWDDAGVLLYSTLNHVKYTLLNGDNGIVRTLDQTVYLVRVKGRNVYCLDRAAKPRILQIDPTEYRFKLALVKRNYEEMLHIIQNSSLVGQSIISYLQKKGYPEIALQFVQDPATRFELAIECGNLEVAVEVAKQLDRPKLWTRLSTEALAHGNHSVVEMCYQKLKHFDKLSFLYLTTGDNTKLSRMAKIAEHRGDFTSRFQNALYLGEVEDRIQMFKEIDLYPLAYMTAKAHGLEEEVQSILEATGLTEDQLNLPTFGKPLTPPSPVVPTYQANWPTKATSQSFFEKALLGQVEGLSLEDEPAAANGLGEAEEEGTAKRDTLGEADEDEDAAGWDMGEDIVAEVEEGFVNVESADAGGAGSSEADLWARNSPLAVDHVAGGSFETAMQLLNRQVGAVNFAPLKPRFLEVYQASKTYLPASAGLPPLVNYVRRTVEETDPRKVLPIIPRDLEYLASNDLQRGYDAMKANRLEDGLRIFKGILHAVLINAVGSDSEVAEAKKLIASASEYAVAMSIELGRRALGSPDTVNQDPQLLKRSLELSAYFTIPKIEVPHRQLALLNAMNLAMRSKNYNSALSFANRILANGGATRILESARRTKAQCERNPNDAVEIEFDQFAEFDICAASHTPIYSGTAYEECAFDGSKYHTKYKGTVCVVCEVCEVGKHGSGLKLFA

SEQ ID NO: 4394 - DNA, 1212 bp, Myceliophthora thermophilia
atgtcgtcagaaaacggcatcttcgccgtcgaccctgagcgggccgccgaggacaactccggctttcttattggggtggtctgcgcggcctggagcctggccttcgtcacggcgctggtccgcttctacacccgcgccgtcgtctcgcgttcgttcggcagggatgatgtgtttatggtcttggccgtgctgtgcgggataggagggcttgcctcctggatcgtcggatgccacaacggttacgggagacacatggataccatccccccagagcgcttcttgacgctgatcgaagcgcaattctaccaatccatcgtggaagcctcgttcgcttttggctttctcaagatatccatcgccttgtcgctattgcgtttcagcaggggcaactggtacaccaagatcctgtggcttctcatcgggctatgggacccggcacttcgaacaaagtgttacagcagagtcatgtatagaaacttcggcctcttcaatgccgcatgcaacatcttcaccgatatcagtttcgccacactgccggtgcccctgatatggggtctgcagctccagagacgagtcaggatatatctaatcgccatcttgagtgggggttactgtgccgttggcttgggcatagcaagggcgctgttcatcattgcctatgtccgcgagaccgacggaaccttgtacgttttcgagcactttaggactgctaattaccaaacaaaattgggaattgccatgctaacactgcacagccttccattcgcccccttatttgaatcccttggtgctgaacatgcaggcagcattcaactcgatatcggcatcatcgccgcctgcgccccgaccctccgcccgctcctgggacgagcgctcaagctctccaccaccctcgacccttaccggggcgcgaactactaccgggcaggtaaagccctcgaccgactcccgcttagcggaaactccacgaggaggtacctgcggcagagtactgcctcggggcagttcttcgagatgaacacggggaacagaccctggattgccccggaacgtaaagtctcggtgttctcagccagtgccgtccatgccgagcgtgcgagagtcaacggggaagcgagcggggagggccttgaggcacccgtcatcctgccaccgagagccgcggagatcagggggatcgtcaagactaccgaagtcagggtcgaagaatga

SEQ ID NO: 4395 - protein, 403 aa, Myceliophthora thermophilia
MSSENGIFAVDPERAAEDNSGFLIGVVCAAWSLAFVTALVRFYTRAVVSRSFGRDDVFMVLAVLCGIGGLASWIVGCHNGYGRHMDTIPPERFLTLIEAQFYQSIVEASFAFGFLKISIALSLLRFSRGNWYTKILWLLIGLWDPALRTKCYSRVMYRNFGLFNAACNIFTDISFATLPVPLIWGLQLQRRVRIYLIAILSGGYCAVGLGIARALFIIAYVRETDGTLYVFEHFRTANYQTKLGIAMLTLHSLPFAPLFESLGAEHAGSIQLDIGIIAACAPTLRPLLGRALKLSTTLDPYRGANYYRAGKALDRLPLSGNSTRRYLRQSTASGQFFEMNTGNRPWIAPERKVSVFSASAVHAERARVNGEASGEGLEAPVILPPRAAEIRGIVKTTEVRVEE

SEQ ID NO: 4396 - DNA, 2811 bp, Myceliophthora thermophilia
atgccctccaacgtcccaaccaactttcaccatccttacacaccttacgatgtgcaactcgaattcatgcgcaccgtttatgatgtcctcgaaaagggggatggccaagtcggtatcctagagagtccaactggcacgtcaaatttcagtttcatcgaaccatgggaaatccctctccctgatctgcgccaccctcacctggctgcgcgcccacaagcgagccggtacgaggcctcgttcgaggccgtctcggccggcatgcggggcgagcccgagtggatggtggaggcggctctgcggcggaagcgggaggagctcgcgcgggagtgggaggaacgcgagagggcgctggagagggtgcgggcccgggagcgggaggccgagagggaggcggcgagggagggcggcgggcggcggaagcgggcgagggtcggcgacgacgacggtggcggcggtcacgccgaggcggacaagaggaggagcgaagaggtcgacgaggagagggagttcctgattgccgactgggagggggacgccgatggtgagagcggatgggaggacggtctgagcagggagacgagggcgttgatggagaaggtcgggcttggtggcggcaagaggagggacgagacagaggacgaggtgatagaagaagaagtcaagatctactatacttcgcgcacccactcgcagctgacacagttcatctcggagctgcggcggccggcgtttcccgcgtcgattccagacggggtgatatcctccagcggaagaggtgatgagaagcccggaaaagaaacagtcaagcaggttcccctatcatcgaggcagaagctatgcatcaacccttcggttgcgcggctcgggtcgctatctggcatcaatgaccggtgcaccgagcttcagcagtcagcggccaaagagagatgcccgttcatgccgaatagcgagaacctaaagcagacacatgagttccgggacgcagcgttggcgacagttcccgatatcgaagacctgtaccgcgttggcaaggagctgcaagtgtgtccgtactacgcctctcggactgcaatccccggggccgaagtcgtcacgctgccttaccccctcttgctgcagaagagcgccagagatgccctcggcatcacactcgaaggaaacgttgtcattatcgacgaggcacacaacatcatggacgcggttgccaatgtctacgctgccgagatctgcttgagtgagctgcggcgagcgaggcagatgctgggaatctatgtgaaacggttcggcaagaagctgaaaggggagaaccgtgttatggttgcgcaggtgggcagggtggtcgagtcactaagcgaatgcctgaacgggcagctcagtgccaagggagaccaaggtattgtcgacccgaacacggtgttgaaggcgcgcggcgcagaccaaatcaatctgtaccaactgatcaagtacattcaggaatccaagctggcatacaaggtccaaagttacctcgcccacacagaaaacgaccaagaagcttcatctgcggggggcggcgagcgcggatcgtcgtcaacaccggtgctccatactcttgtatccttcttgaccgcacttacaaacctcagtgccgagggtcggatattctacgaaaagctcgccgagaaccagggggatatcaaactctcctacctcttactgtctccgacgcatgccttctcatccatcgcatcagcggcaagagctgtcatcctcgccgggggtacaatgtcaccgtttgaagactacaagatgcacctcttcccagctttgccgtcacacaagatcaccactctgagctgcggccacgttattccggcgtccaacctcttttgctggactctctcctccattaagccaactccgtcaggcgatccgagcgcttcggactgtttcgaattcagtttccaaagacgccaggagccagccatgatccgccaactcggccttgtcctcctcaacatctgttctgtcgtcccggacggggtggtcgtcttcttcccgagctacggctacctcgaccaggtcgtggccgcatggcagacgcaggaagccggaacaggcgccaccaccaccaccacacaacaaccaacgctgtgggaccgcctcgccgcgaagaaggccgtcttccgggagaccaagggggccaccagcgaggacatcctccagcaatacagcaccgccgtcctgtcgccgcggcagcccgataggaggaacccagccgacaagcctcctccgccgggtgggcggggcgctctcctgctcagcgtggtgggcggcaagctctcggagggcatcaatttctccgaccggctgggccgctgcgtcgtcgtggtcggcctgccctaccccaacgtccacgctcccgactggaaagcgaggctcgagtacgtcgagtcgacggcgctggcacggctcgtcggtggcggcggcgatggcggtgatggcggtgatgatgatgatggccaaccgggaggagcgagagaggaggcggcggcgacggcggcgcgggcgcaggcgaagcaggcggcgagggagttctacgagaacacgtgcatgagggcggtgaaccagagcatcgggcgggcgatccggcaccgcggggactacgcggcggtggtgctcgtcgatcggcggtttggcacggagcggatcagggggaagctgcccggctggatccgggcgggaatggtgcagggtgcggaagcgaaagggctgcaggggcttatggggggattaaacctgttcttcaagggaaagagggagcaggcgtga

SEQ ID NO: 4397 - protein, 936 aa, Myceliophthora thermophilia
MPSNVPTNFHHPYTPYDVQLEFMRTVYDVLEKGDGQVGILESPTGTSNFSFIEPWEIPLPDLRHPHLAARPQASRYEASFEAVSAGMRGEPEWMVEAALRRKREELAREWEERERALERVRAREREAEREAAREGGGRRKRARVGDDDGGGGHAEADKRRSEEVDEEREFLIADWEGDADGESGWEDGLSRETRALMEKVGLGGGKRRDETEDEVIEEEVKIYYTSRTHSQLTQFISELRRPAFPASIPDGVISSSGRGDEKPGKETVKQVPLSSRQKLCINPSVARLGSLSGINDRCTELQQSAAKERCPFMPNSENLKQTHEFRDAALATVPDIEDLYRVGKELQVCPYYASRTAIPGAEVVTLPYPLLLQKSARDALGITLEGNVVIIDEAHNIMDAVANVYAAEICLSELRRARQMLGIYVKRFGKKLKGENRVMVAQVGRVVESLSECLNGQLSAKGDQGIVDPNTVLKARGADQINLYQLIKYIQESKLAYKVQSYLAHTENDQEASSAGGGERGSSSTPVLHTLVSFLTALTNLSAEGRIFYEKLAENQGDIKLSYLLLSPTHAFSSIASAARAVILAGGTMSPFEDYKMHLFPALPSHKITTLSCGHVIPASNLFCWTLSSIKPTPSGDPSASDCFEFSFQRRQEPAMIRQLGLVLLNICSVVPDGVVVFFPSYGYLDQVVAAWQTQEAGTGATTTTTQQPTLWDRLAAKKAVFRETKGATSEDILQQYSTAVLSPRQPDRRNPADKPPPPGGRGALLLSVVGGKLSEGINFSDRLGRCVVVVGLPYPNVHAPDWKARLEYVESTALARLVGGGGDGGDGGDDDDGQPGGAREEAAATAARAQAKQAAREFYENTCMRAVNQSIGRAIRHRGDYAAVVLVDRRFGTERIRGKLPGWIRAGMVQGAEAKGLQGLMGGLNLFFKGKREQA

SEQ ID NO: 4398 - DNA, 1473 bp, Myceliophthora thermophilia
atggcgacagtcatgccttcacgtagccgccacgtggactcctttcaagcagattcccagtcgttccgaatccatgaagatgcaccctccaccgaagacacagagatgaacgagagcgctctgcaggacgaggacgaggcagaacaagagaacgagccgctcgaggaggatggccagaactcggattattcagatagctcagaagacgagccgccagacgacgacagccacttccagcaagacatggtgaagctgcagaatgcctttgtgggatttcggcaaaagtaccgtctgatcaagcggattggtgaaggaaccttctcgaccgtatacaaagccgaggacttggcctacgacaaatacgacaactcgtgggatccggacaaggagctagacaagtggacgccgcccccgttgaagaactccgccagccagtccggcacagccccgagccacgagtcccaaccacaacgccgtcgcaaacccaaatatgtggccatcaagaagatctatgtcacgtcctctccaagccgcatcctcaacgagctggagcttctgcacgacctacgcggatgcgactcggtatgccccctcatcaccgctttccgctccacagaccaggtggtcgccatcctcccctattttcgacatgcagacttccgcgactacttccgtaaaatgacggtgccggacatggcgatctacctgcggtcactctttaccgcactagcgagcgtgcactctcacaacattctccaccgcgacattaaaccgacaaactttttgtacgacccggagacccgccgcggcgtcctggtcgatttcggccttgccgagcgtgaggggtacgactgcagaccgtgtgtctgccacgacgaccccgtagcccgcaaggcgaagctacggccgctgatcagcagtgagaagaagggcgcataccttcgggaggatacgcgccccgcgcggcgggcgaaccgcgcgggcacgcgggggttccgggcgcccgaagtactcttcaagtgcacggagcagactaccaagattgacatctggagcgccggggtcatcctgctgaccatcttatcccggcggttccccttcttcaactcagccgacgacgttgaggcgatgattgagatcgccactattttcgggcggcaacgcatgcaagctgctgctctactacacgggtgcatgctagagacgacgatccctaccatcgggaggtccggtttcagttttgagggtatcatcttgtggagcaccggacggagcgaaaccaatgataagctcagtgatgacgagaagcttgccattcagtttctctcgcggtgcatggaactagacccaagccgacgcattagcgccgaggatgcattgaagcacccgttcctgcggatgggactcgacgagtcggtggatgcagcgagtaataccggcgatgacgacgaaatggacatgttgaaggcttga

SEQ ID NO: 4399 - protein, 490 aa, Myceliophthora thermophilia
MATVMPSRSRHVDSFQADSQSFRIHEDAPSTEDTEMNESALQDEDEAEQENEPLEEDGQNSDYSDSSEDEPPDDDSHFQQDMVKLQNAFVGFRQKYRLIKRIGEGTFSTVYKAEDLAYDKYDNSWDPDKELDKWTPPPLKNSASQSGTAPSHESQPQRRRKPKYVAIKKIYVTSSPSRILNELELLHDLRGCDSVCPLITAFRSTDQVVAILPYFRHADFRDYFRKMTVPDMAIYLRSLFTALASVHSHNILHRDIKPTNFLYDPETRRGVLVDFGLAEREGYDCRPCVCHDDPVARKAKLRPLISSEKKGAYLREDTRPARRANRAGTRGFRAPEVLFKCTEQTTKIDIWSAGVILLTILSRRFPFFNSADDVEAMIEIATIFGRQRMQAAALLHGCMLETTIPTIGRSGFSFEGIILWSTGRSETNDKLSDDEKLAIQFLSRCMELDPSRRISAEDALKHPFLRMGLDESVDAASNTGDDDEMDMLKA

SEQ ID NO: 4400 - DNA, 2742 bp, Myceliophthora thermophilia
atgtcaaaaaccgtccggctggggagccggctacggtaccccatcaccgtcgtcaagctccacaaaaaacccggggacaggataaagaaacaagaaaccctcatggaatattcgttcaaatggtggaaggaggttggcgactccatccgtggcgagacctggaaagaagagcagacgaccatcgtgacatgggactccccgagcgatggcgagctgaggcactggctcatccgcgaaggccagcacatcgtgtccgacacgccagctatggaggtcaaggaggattgcccacacgagatccaattccagggcctctgcggcatgtgcggcaaggatatgaccgaagtcaactgggcgaccgagactagcgacacggcgcgtgctcccatcaacatggtgcacgaccagactaacctgaccgtcagcgcggttcaagctcagcgcacagaacaggagcttcagcggcgcctcctcaagagccgcaaactgagcttggtagtcgatctggaccaaaccatcatccaggcctgcatcgacccaaccgtgggcgagtggcagaaggacccaaccaacccgaaccacgagttggccaaggaggtcaagagcttccagctggacgacggtccgaccgacttggcgcgacgatgctggtactacatcaagatgcgcccggggctccaggacttcttgaagcgcatcgccgagatgtacgagctgcatgtctacaccatgggtacgcgcgcatacgcacagaatgtggcacgcgttgttgacccagacaagaagctattcggtaaccgcgtcatcagccgcgacgagaacggcaatatcttcgccaagagcctgcaccggctcttcccagtcagcactcacatggtggccattatcgacgaccggtccgacgtctggccgcgtaaccgacctaacctgatcaaggtctcgccttacgagtttttcaagggcatcggggatatcaactccaacctcttaccgaagcgccaggacctgctcacgtcgggcgcgacggccaacggggcgaagaaggggaagaagagcaaagcatccgagaaccaagaggtcgccgtcgccggaaccgacgacggcgcgttgacacaacagcaggtcgaggagcaggagcgcgcgctcgagaagcagatcaaggacaggccgctccaggtgctccaagagcagctcgatcgtgaggacgaagaggctgagaaggcgaccgttcaatcggatgacggttccgagtcacgctcgtcgtcccctgctccacagcgccatcgcgtcttgcaggacgacgacgaggagctcaagtatctcgagcagcacctcaccgccctccatcgggccttttacgacgagtacgacagaaagcgagcggcgcatgattcgtccgccgacgtcgacctcgactcagtgccagacgccgggcgtattctcgaccagctcaagagcacagtcctacagggcaagaagattgtcctgtctggcttactgccaagggacatcaacatataccgctccgagctcggcctccagatcatgtccttcggcgcggagctcctcaccaaggtcagccgagatgtgacacacctcgtcgtcaatgccgcgcagccgggtagggagaagctcctccaagcccggcggcgacctcacatcaagattgtcagccaggaatggctagctgcctgcttcagccagtggaaggccgtcgacgagtcgccttacctcttcacggcgcgcctcgtcgaagaggacgatccggaacacaagcagctcatcgccagtgacgaggacgaagacgaggttgaagacacggacaccgaagccgacagcagcggcagaggcctcaacggtgaaactaacggcaccagtcccaggttaaaactcatatccccgaccggccagacccacacgttcaagctaaagaagaatggcgaatccgccgacgacgaagagagcgacccgggcgatgatgatgatgatgatgaggaaattgaggagggcctcctccccgatgatcttcccgacggccagtcgtcgcccatcgacgggctcaagacattcaactggggctcggcggacgaggagctagccgagtttctggcgagtgggtcggacgacgatgacgaggacgaggacgaagatgaggacgaagaaggcgacggcgatgacggcgagggcgagggtgagaaggatggcgacgacaacgggccccgcgccgaagaggacgaagacgagttcggctcctcgtcgctgggggaggaggatggtcggaggaggaggagtaaaagtgctagcccgtccactggtggtggtggtggcagtagcaagaagaggaaggatcgtgacgaagacgacgatgacggtggagatggcgagggtgaaggccaagggggaaatggcacgcctgcgaagcgcctgcgcaggacggagagccaacacgggtcgtcgctgcggagtctctatcgtgcgggggagaatgggagcagcttgccgacgccgggcagatcggacaggcaggatgcggagatggagggcacggaggacagtgccgtggaggaggagggtgacgaggtggagggagaagaggacgaggagatggagtttgatgtcgccgagctcgaggccgagttcgaggccgagtttggcaaagccgaggccgaactggaggctcagatggccgccgaagagacgacgtctggcgctgaaggggatgtgggtacggagaatggctag

SEQ ID NO: 4401 - protein, 913 aa, Myceliophthora thermophilia
MSKTVRLGSRLRYPITVVKLHKKPGDRIKKQETLMEYSFKWWKEVGDSIRGETWKEEQTTIVTWDSPSDGELRHWLIREGQHIVSDTPAMEVKEDCPHEIQFQGLCGMCGKDMTEVNWATETSDTARAPINMVHDQTNLTVSAVQAQRTEQELQRRLLKSRKLSLVVDLDQTIIQACIDPTVGEWQKDPTNPNHELAKEVKSFQLDDGPTDLARRCWYYIKMRPGLQDFLKRIAEMYELHVYTMGTRAYAQNVARVVDPDKKLFGNRVISRDENGNIFAKSLHRLFPVSTHMVAIIDDRSDVWPRNRPNLIKVSPYEFFKGIGDINSNLLPKRQDLLTSGATANGAKKGKKSKASENQEVAVAGTDDGALTQQQVEEQERALEKQIKDRPLQVLQEQLDREDEEAEKATVQSDDGSESRSSSPAPQRHRVLQDDDEELKYLEQHLTALHRAFYDEYDRKRAAHDSSADVDLDSVPDAGRILDQLKSTVLQGKKIVLSGLLPRDINIYRSELGLQIMSFGAELLTKVSRDVTHLVVNAAQPGREKLLQARRRPHIKIVSQEWLAACFSQWKAVDESPYLFTARLVEEDDPEHKQLIASDEDEDEVEDTDTEADSSGRGLNGETNGTSPRLKLISPTGQTHTFKLKKNGESADDEESDPGDDDDDDEEIEEGLLPDDLPDGQSSPIDGLKTFNWGSADEELAEFLASGSDDDDEDEDEDEDEEGDGDDGEGEGEKDGDDNGPRAEEDEDEFGSSSLGEEDGRRRRSKSASPSTGGGGGSSKKRKDRDEDDDDGGDGEGEGQGGNGTPAKRLRRTESQHGSSLRSLYRAGENGSSLPTPGRSDRQDAEMEGTEDSAVEEEGDEVEGEEDEEMEFDVAELEAEFEAEFGKAEAELEAQMAAEETTSGAEGDVGTENG

SEQ ID NO: 4402 - DNA, 1245 bp, Myceliophthora thermophilia
atgaacgggctgccgcggactgcgcacctcgaggcacggtgttggtgctctacccgtctaccgacggctttcgccgcgaatcgaccttttacgggtatagaacctggtttccaggctggcaaagtccgccggcttcatcaacgagctcatggcggcgaatgcagaacctcgaccattcagcggctattgaggccatgtgcgaagcctggagggaaccctctcccggccttcaacaatgccgaggccatagcaatgcctagtcgccggtacaacaccaccaccaccacaacaacaacaaacaacaccgacacgacgacgccacaagcgcaagaaccgcgaatccacagcatcttcgagccgcagacgtccacctggcagtacatcgtggccgacccggcgacccgcgccgcggtcgtcatcgacccggtgctggactacgacaagaccacgcgcgccatctccaccaccgccgccgacgccctcctggacttcatccgctccgagggttacaccgtctcgcacgtgctcgagacgcacgcgcacgcggaccacctgacggcggccttctacctccggcgacggctcgccgccctgcaagggcaagggggacgacccggcggcgaccagggggcggcgccggcggtgggcatcggccgccgcatcggcgaggtgcagggcctgttcgggaagcgctacggcgtcgcctgcgacgagtacgacggcgcgtttgacctcctcctggacgacgaccaggtcttctggattggccagctgcccgcgcaagtcatgcatctgcccgggcacacgccggaccacgtcggctatcggatcggagacaacgtcttttgcggcgactcgctgttccaccccgcgctggggacggcgcggtgcgatttccccggcgggagcgcgcgggcgctgtatcagtcagcgaggaagctgctctcgctgccggaccatgtcaaggtgtgggttgggcacgactatccccccgagggggagagggcgccggagccgtggactacggtcggcgagcaccgagcaaggaacaagcatgtcagggacggggttaccgaggacgagtttgtgcagatgaggaacgccagggacaaggtcctgggggcgccacggctgctgcacgagagtctgcaggtgaatatccgcgccgggcagctgcccagggcggacgagtcggggatgaggacgcttcggctaccgatcaaggtacccgacgagggttggtag

SEQ ID NO: 4403 - protein, 414 aa, Myceliophthora thermophilia
MNGLPRTAHLEARCWCSTRLPTAFAANRPFTGIEPGFQAGKVRRLHQRAHGGECRTSTIQRLLRPCAKPGGNPLPAFNNAEAIAMPSRRYNTTTTTTTTNNTDTTTPQAQEPRIHSIFEPQTSTWQYIVADPATRAAVVIDPVLDYDKTTRAISTTAADALLDFIRSEGYTVSHVLETHAHADHLTAAFYLRRRLAALQGQGGRPGGDQGAAPAVGIGRRIGEVQGLFGKRYGVACDEYDGAFDLLLDDDQVFWIGQLPAQVMHLPGHTPDHVGYRIGDNVFCGDSLFHPALGTARCDFPGGSARALYQSARKLLSLPDHVKVWVGHDYPPEGERAPEPWTTVGEHRARNKHVRDGVTEDEFVQMRNARDKVLGAPRLLHESLQVNIRAGQLPRADESGMRTLRLPIKVPDEGW

SEQ ID NO: 4404 - DNA, 1332 bp, Myceliophthora thermophilia
atggcaacgcagactgtcgaggttcagacagagctcgtagagattccttcagaaccccgaagtgaaaacagaacatcgacgcaatcggaccatgatggcgctccttccgcggccaaatacgatcgagcaaccatcttgaggtccataagcgccggcttctcattctttgtggcaggagtcaacgacgggagcatggggcccttggtgccctacttcatgcgccagtatgaaatcaaccctaccatcgtctccgccttattcgctgccagcttctttggttggctcttcaccgccgtcaccaacacgcacatatgccagtacctcgacctcggcgccatgctcgccatcggggcagccagccaagtaataggccaggctctgcggtcctggggccctccctttggtctcctcgccttcagcttctggttcatcacggtgggccaggcattccaggacacccacgctaacacgtttgtcaccaaactcccgtcggcgcaccgttggctgggtttcatccacgccatgtacatggccggctgcctcgtcggccccttcgtcgcgaccgccgtcgcctcggccggctccgtctcgcgctggtatctcttctacaccttcccgctcggcctgggcgtcgccaacctggtcctcgtcttcgtcgctttccgctccaccgtcggccgcctgccgaggaaaaggacggtgacctcctcttcgtccccccacgccgcggccggtgaggcggaacccgcgacgtcccggaacaaggccgccgcgacccttatcaagaacaccgtccgcatgccgaccgtctggctgctgagcttcttcttcttcttcttcctgggcgccgccgtcaccgcagggggctggcttgtcgagtacctcgtcgtcgtccgcggcggcgagctcgcccagatgggctacatccccgcagggttcaacggaggctgcttcctggggaggctgctcttggccgagcccaccaaacgtctcggggagcgcagaatgatcctcgtatactccgttttgtgcatcgggctccagttgctcttctggctagttccaaacatcattgcggcctctatcgctggtgtctcggtcgcctcgaagttgttccctccagccatccattccacagctcttcccctcgtcttcgtcattgggcagatcggaggatccgtgtttcccatcgtcaccggaatcctggccacccacgagggcgtcaaggtcttgcagcccatcctggtcgccctgttcgcctgcaccgctctgacgtggctgtccattcccgctccaaagtcaaccgcgaacacagcccttcatcaggaatga

SEQ ID NO: 4405 - protein, 443 aa, Myceliophthora thermophilia
MATQTVEVQTELVEIPSEPRSENRTSTQSDHDGAPSAAKYDRATILRSISAGFSFFVAGVNDGSMGPLVPYFMRQYEINPTIVSALFAASFFGWLFTAVTNTHICQYLDLGAMLAIGAASQVIGQALRSWGPPFGLLAFSFWFITVGQAFQDTHANTFVTKLPSAHRWLGFIHAMYMAGCLVGPFVATAVASAGSVSRWYLFYTFPLGLGVANLVLVFVAFRSTVGRLPRKRTVTSSSSPHAAAGEAEPATSRNKAAATLIKNTVRMPTVWLLSFFFFFFLGAAVTAGGWLVEYLVVVRGGELAQMGYIPAGFNGGCFLGRLLLAEPTKRLGERRMILVYSVLCIGLQLLFWLVPNIIAASIAGVSVASKLFPPAIHSTALPLVFVIGQIGGSVFPIVTGILATHEGVKVLQPILVALFACTALTWLSIPAPKSTANTALHQE

SEQ ID NO: 4406 - DNA, 978 bp, Myceliophthora thermophilia
atgtcgaccatctcggacgctatcaccaaggaccaccgcgagttggagcagtactacaacgagatcaccaattcaaatgaccatgatcaccaagagcgcttcggcaaccagttcacctgggaactggctcgccacagcgtagccgaggagctgatcgtctatcccgcctttgaaaagcacatgggcgacaggggacacaagatggccgagtcggaccgcaaggaacaccaccgggtcaaggagctgctcaagcagttccagaacatgaagccgcagcagcccgactacatcccgaagctcaaggagctctggggcgtgctgtcggcgcacatcgaggaggaggagcacagcgacctgccggcgctcgagtcggcgctgaccatggcgcgggaggccggcgagtcggagaagatggccaagaagttcggcatgaccaaggcgttcgtgccctcccgcagccaccccagcgccggcgagaacccttacttcgagtcggccctcggcctgctggccgccccgatcgaccacatcgccgacatctttaggaagttcccggagcagaagcccagcgacgcgcggcggcgacttcaccgcgggctcgagtacctctcgcatggcgaggatctggacagacggaggcggccgcccggatccccgctgatcatcgacccgcagctgaaacgtgcggcggagacctttgacatacccatctcgtcgcgactggtctgcgccctcctgagcgtggtcctcctgcaggaggaagggctcctggacaacttcaaggtgaagagagtcagccccggcatctctacgctggtgggctcgttccgcaacaaggagaacgccgaggttgccagggttgccatggcgcaggattcttggatcaagaggttagaggtcgcgttcggactctttcgccgcaaagatgcttttcatggagagcttacgaaggctttgcggctgcgacacaaaacgtag

SEQ ID NO: 4407 - protein, 325 aa, Myceliophthora thermophilia
MSTISDAITKDHRELEQYYNEITNSNDHDHQERFGNQFTWELARHSVAEELIVYPAFEKHMGDRGHKMAESDRKEHHRVKELLKQFQNMKPQQPDYIPKLKELWGVLSAHIEEEEHSDLPALESALTMAREAGESEKMAKKFGMTKAFVPSRSHPSAGENPYFESALGLLAAPIDHIADIFRKFPEQKPSDARRRLHRGLEYLSHGEDLDRRRRPPGSPLIIDPQLKRAAETFDIPISSRLVCALLSVVLLQEEGLLDNFKVKRVSPGISTLVGSFRNKENAEVARVAMAQDSWIKRLEVAFGLFRRKDAFHGELTKALRLRHKT

SEQ ID NO: 4408 - DNA, 2814 bp, Myceliophthora thermophilia
atgagttccaccagtactcagctgccagttcggccgagcacgcgcggtgctcaggctgatcgacctcctcaatcttcatctccgtcccacgactccgattccagtgacggcagcaagtactcggacttgatgtccgagtctcccgagactccgaccccggctccgagatgcagcgagccaagcgcccagccggccatcgaacccctctctgacagcgcggcctcaccagtgccggcagcacccagcagacctgtccggaggcgcttgtttcccgacgcccccagcagcggagatcggacgcggccgtttcttccggtgagatcggagccccgtgctgctgctgccgccgactctacggctccgtcttcatccgggtggtacacttcggccacttttgtgggcgcggacccgcctcgctcgacgcttcttcccgggtccgtcacgactccggcagatgtaagtgcagacatgcgtgtggttcccagttctggctctcgtggtggtcgtggtggcggtcgtgcgggtgcgagtgtttgggttgcggtgtcgaatcgatcgacggcccctggatggcacgaggagggtggcgcgccgagggaagggcccggcccacggaggcaggagggttttgtgcagtggaccaacccggtgcccgagagtcccttcgtgatgcgagagggagcaaggggtgcccacgggcgcggtcccttcgccgagcgccccccgacccctccgcgtccgcctcggccggtttgccccctcttgccctccgacgggtacgcggtccccccctcgcgcggatgggttgagtcgaccgtcatcgaccggtcgaacccatacgccgcctttctccgtgccaacaaggaggtgctcgctggaaacgcctccaacggcgccggtctctcgcggacgggggcagccaatggcgcggatggggagacggcgggcatgacttgggataaagcccaccgcgcggccatggctgatccagcctacctccctcccggtcaccctcgcccgggaaacactggcagccagccgatggcgcgcggagctcgccctctttccaattccgccccgtattctgccagccggcgcggccgttcttcctcggaattaacgagaacaatggcaccgcgaaacgcggcttcttccatctcccggagcaaccagacaattcttttatcgaccctgcgttatcccaccgctctccccaacaacctgttctccctgacccaaatggcgcaaaataattcttctgaaatcaccttgcgcaagttggagcccgcaatggctcgtcaactggtcgagaacgcgcagtcggtcgagtaccagctgctgcagcgcaagatctccgagaacgcccgcgctggtacccaagggtcagccgacaacaagaccacgatggacaacgtaagcaccgttgcccatctggatcctgactcggatgaggatgccttcgggtactccgacaccgagcaggacgaccaagacaacggcaacggacacgagattcccgaggcggccgatgccatcgcgtattacccaacgcatggcgataataatagcgaccaattctctcaagaaattgtcgaggaggcttatgaaggccaatattacgacgatcacgacctcgacaacattatcaacgacaacgcggccatcatccaaaacgacgaccctcaaaacggcgcaatcacgccgggcgaaaacagcagctttggctgggatgttgcgccgaccccccacatccccgacgtcgaccccatccacatgtacaaccccttctacaacccggccgccgcctactggagcaccttcccagacgggccctacgtggacgagttcggcgtcgtgacggcagggcgcccgatggtcagcctccatagcgaccctccgctgccgaccttcgacacggacccgttcctccccttcgccccctggcgcgtcaaccagctgcccgccttccagcccgagaccgcccaccgcgtcctcaccgtgccggccgcctacctgccgtgcctgggcagcctctacccggacgccaccttcctcgtctcgcgccacccggcctcggccaacttcaccatccgcctcaagggcgccgccctggcctcctccgtcgccctgcacttcccccacctgaccgacccgtctcgcttgatgacgaggacccggtcggtcgccgccactaccaccaccaccaccaacagcaacaacaacaacagcaacggcagcgagggcgatgacgacgacaacgacaacgacaacgccgacgacaacgtcgagatcgacacgggcgacaagtacgtcgtcgcgctcgtccagcgcgactggccggtcgggggcgtcggcttcctgcccaacacgccgtcggcggccgagttcgtcgacgccctgcgcggggccttcgacgtgctgccggccgggcaggaggtgttctacttcctgtcctgcgacgtcgcccttgccgggggttccggcggaaccgggcggggcgtgtacgtctgccgcgcgtacgagggccgcaggggcccccaggacggccgcatcgtcgacgcctggctccgctgccagggcgcccgcggcgtgccccaggacgacctgggcagggacgtgctcgcgcgcatgggcgaggcctgggtcgagcccgaccgcgggtcgtccagggcgcctgctgctgctgctgctgctgctgctgctgcggcggcggcggcggcggcggcggcgaggggaaggcggggagggccgaggaggaggggtgtgggggtggaatacgacgacgagggtgacgacgacaattacgagggttag

SEQ ID NO: 4409 - protein, 937 aa, Myceliophthora thermophilia
MSSTSTQLPVRPSTRGAQADRPPQSSSPSHDSDSSDGSKYSDLMSESPETPTPAPRCSEPSAQPAIEPLSDSAASPVPAAPSRPVRRRLFPDAPSSGDRTRPFLPVRSEPRAAAAADSTAPSSSGWYTSATFVGADPPRSTLLPGSVTTPADVSADMRVVPSSGSRGGRGGGRAGASVWVAVSNRSTAPGWHEEGGAPREGPGPRRQEGFVQWTNPVPESPFVMREGARGAHGRGPFAERPPTPPRPPRPVCPLLPSDGYAVPPSRGWVESTVIDRSNPYAAFLRANKEVLAGNASNGAGLSRTGAANGADGETAGMTWDKAHRAAMADPAYLPPGHPRPGNTGSQPMARGARPLSNSAPYSASRRGRSSSELTRTMAPRNAASSISRSNQTILLSTLRYPTALPNNLFSLTQMAQNNSSEITLRKLEPAMARQLVENAQSVEYQLLQRKISENARAGTQGSADNKTTMDNVSTVAHLDPDSDEDAFGYSDTEQDDQDNGNGHEIPEAADAIAYYPTHGDNNSDQFSQEIVEEAYEGQYYDDHDLDNIINDNAAIIQNDDPQNGAITPGENSSFGWDVAPTPHIPDVDPIHMYNPFYNPAAAYWSTFPDGPYVDEFGVVTAGRPMVSLHSDPPLPTFDTDPFLPFAPWRVNQLPAFQPETAHRVLTVPAAYLPCLGSLYPDATFLVSRHPASANFTIRLKGAALASSVALHFPHLTDPSRLMTRTRSVAATTTTTTNSNNNNSNGSEGDDDDNDNDNADDNVEIDTGDKYVVALVQRDWPVGGVGFLPNTPSAAEFVDALRGAFDVLPAGQEVFYFLSCDVALAGGSGGTGRGVYVCRAYEGRRGPQDGRIVDAWLRCQGARGVPQDDLGRDVLARMGEAWVEPDRGSSRAPAAAAAAAAAAAAAAAAAARGRRGGPRRRGVGVEYDDEGDDDNYEG

SEQ ID NO: 4410 - DNA, 1221 bp, Myceliophthora thermophilia
atgaacggcaacgaccgagtgcttcaactgtctgggagctgcaataactatccctggggaaagcaggggcagcaatcactcgcggctcggctctgcaaaacgacagccaaggatttcgaaatcaaggatgacgaatactactcggaaatgtggttcggggactaccctgactacccggcccgcgtcctggagactggcaaacccctgaaggacgtgctcaacgagaataaggagaggcttctaggaaagaaggtcatcgatgatgaactagacggccaactcccttttctgccaaagatcctctccatcgccaaggctctcccgctacaaatacatccgaacaaagacctcgccgccaagctgcacgccaaggatcctgataacttcaccgaccccaaccataagcccgaaatcgccgtcgccctctccaggttcgaggtctttgctggattcaagccgctgtccgagatcgagccgctcttccgactccccgccctccgcccctttgtccccgacggcacgacgcaatggaccgacaagacactgcgcgaggtaacccgcaacatcctcaaaggcggcgatgccacggtaaaacgcgtccaggatggcctgttgtccaccgcaaagtcagacctcggctcggccgggtacatcctcgacctgctcccacgtctgcagagacaatacgggccgcaagacccgggctcgctggtggcgctcgcgtgcatgaactttctggtcctgcagcccggagacgcgctcttcatccccgccgacggcatccacgcctacctgagcggggacattgtcgagtgcatggcgcgcagcaacaacgtgctcaactcgggcttctgcccgcccgccgagcggaacagcatcgacctcttcgccgacacgctcaccttccgggcgcactcgcgcgacgacgtcgtgctcccgagcgccgagacgcccaggagcaggaccggcaagacgcgcgtctaccggccgcccgtgagcgagttcgacatgctgagggccgagctcgcggccggagaggcagacgagatctcggagagcgacgggccgggggtcttgattgtcaccaagggcagcggcaggatggaggccgatggaaagaagttcgaactggcggaaggggccatctactttgtcgccccaagggtgagggtgagatgggagaccgacacggggatggaggtgtacatggcggttgtttaa

SEQ ID NO: 4411 - protein, 406 aa, Myceliophthora thermophilia
MNGNDRVLQLSGSCNNYPWGKQGQQSLAARLCKTTAKDFEIKDDEYYSEMWFGDYPDYPARVLETGKPLKDVLNENKERLLGKKVIDDELDGQLPFLPKILSIAKALPLQIHPNKDLAAKLHAKDPDNFTDPNHKPEIAVALSRFEVFAGFKPLSEIEPLFRLPALRPFVPDGTTQWTDKTLREVTRNILKGGDATVKRVQDGLLSTAKSDLGSAGYILDLLPRLQRQYGPQDPGSLVALACMNFLVLQPGDALFIPADGIHAYLSGDIVECMARSNNVLNSGFCPPAERNSIDLFADTLTFRAHSRDDVVLPSAETPRSRTGKTRVYRPPVSEFDMLRAELAAGEADEISESDGPGVLIVTKGSGRMEADGKKFELAEGAIYFVAPRVRVRWETDTGMEVYMAVV

SEQ ID NO: 4412 - DNA, 1401 bp, Myceliophthora thermophilia
atggcgacagcgcaaggctcttgggcgcccggatcactcgcaaagcgcatctttttcgagctcggcctggcatcactggcgcgttcgccgcgcgatgtcaagctgctggtggtgcagcgcttcgtgcggttcgtcgcgtacggcagctcgacgctggtgctcgtctcgttcctgggcgccctcggccactcgcgggcccgcgccgggctgttcatgacgctcaccctcgtcggcgacgtgctcgtctcgctgctgctctccctcagcgccgaccgcctcctcggccgccgcgccgtcctcgtcctcggcgccgccctcatggccgcctcgggcctcgtcttcgccgccgccccgccctccttctgggtcctgctggccgccgccgtcctcggcgtcatcagccccagcggcaacgaggtcgggcccttccgcgccgtcgaggagagcattgtcgcccacctcacccccgccgccgaccgctccgacgtctacgcctggtccaccctcgccggcaccgccggcaccgccgtcggcgcaatgagctgcgcaccgcccctgggctggtcgctcctcgatgcctaccgcgccgtattcttggcttacgccggcttgggcctgcttaagctggtcctcgccctggcgctctcccccgccgtcgaggaggacgaggaaatgtcttccgattccggcaaccatcccagaggtgctccgaatgccaccacgccgctgcttggttccgaggccgcttcccagcccgaggccggcaagacccgctggtgggcaaagctgttgccgcggctcagtcccgagagcagaggcatcacggccatcttctgcctactgtttgccttggattcctttgcctcgggtctagccccgtggtcctgggttacatattatttccgctctcagtttagccttgaggagggtcggctcgggtcattgttcttcaccacaagcattatctctgctgtctcggtcgtcctcgcctcgtccctggccaagcgcctcgggaatgtcaaaacaatggtcttcactcaccttccatcctccatcttcctcgccctcatcggaactacctcatccctgcccttgtccatcctctttctcgttctccgggcttgcacccaaaatatggacgccgccccgcgctcggcattcctcgccgcggtactcctccccggtgagcgtaccgccatcatgggcgtcatcaatgtcgtcaagaccaccgcgcagagtctcggcccgttcatcaccggcgtcctcgccggcaagggactgttttgggccagcttcgtctgcgctggctctctcaaggccacctatgacctcggcctgctggccgtcttcaagaaccacgcaagagccaggcaggggccgcgcgaggaggagcagccttga

SEQ ID NO: 4413 - protein, 466 aa, Myceliophthora thermophilia
MATAQGSWAPGSLAKRIFFELGLASLARSPRDVKLLVVQRFVRFVAYGSSTLVLVSFLGALGHSRARAGLFMTLTLVGDVLVSLLLSLSADRLLGRRAVLVLGAALMAASGLVFAAAPPSFWVLLAAAVLGVISPSGNEVGPFRAVEESIVAHLTPAADRSDVYAWSTLAGTAGTAVGAMSCAPPLGWSLLDAYRAVFLAYAGLGLLKLVLALALSPAVEEDEEMSSDSGNHPRGAPNATTPLLGSEAASQPEAGKTRWWAKLLPRLSPESRGITAIFCLLFALDSFASGLAPWSWVTYYFRSQFSLEEGRLGSLFFTTSIISAVSVVLASSLAKRLGNVKTMVFTHLPSSIFLALIGTTSSLPLSILFLVLRACTQNMDAAPRSAFLAAVLLPGERTAIMGVINVVKTTAQSLGPFITGVLAGKGLFWASFVCAGSLKATYDLGLLAVFKNHARARQGPREEEQP

SEQ ID NO: 4414 - DNA, 900 bp, Myceliophthora thermophilia
atgcctcaagcaggaaatctgacgcacgcagcctcatcttgttttgccccgtttcgccgcttggcccatggcatcgccgactacgcgactcgggcgctgactgcgggcgctttccccatccgcggcatctggtacttcctccgccatcctgagttctaccccctctttgtcggaagattgctcccgctgtcggtcatatcgttcattgtttatctgctgctctttaccttcacgttcctgccccagtttctgttcctcctcatcttccatggtcgcgctagcgccctgatcaacaccacggtgctggtgctcggagagggcctcgtaatcatccagggcctgtttgagggcttcttcgtcgatgagtgccgggtggacatctttgacgccactctaatcaactatggctttaccgacttgatcgcgccacaacgtgtcctcttcctcgaggccccgaacgccgtacgcatgctcggaaagccgacctcccgcgccgaatatcagccgtggagcataaaacagatcatcgagctcattgtcttcctcccgctcaacctcgttccctacgtcggtacgattgcgttcatcatgatcaccggctcccgcctcggcaagctttcacatcaccgatggttcaaactcaagggacttgacaagagggcaaagaagagcgagctacggttgaggcggtgggaatatctctggtttgggaccgtcgccatgatcctggagctcgtaccgatcctgagcttctttttcctgctgactagcacagctggggcggccatgtgggcggcgaagatggaagagagggcgaggacgcgggtcggccagcccatcacggacgaggatcgttcccaggatgtggacgggcctatatatcatgatgacctggtttga

SEQ ID NO: 4415 - protein, 299 aa, Myceliophthora thermophilia
MPQAGNLTHAASSCFAPFRRLAHGIADYATRALTAGAFPIRGIWYFLRHPEFYPLFVGRLLPLSVISFIVYLLLFTFTFLPQFLFLLIFHGRASALINTTVLVLGEGLVIIQGLFEGFFVDECRVDIFDATLINYGFTDLIAPQRVLFLEAPNAVRMLGKPTSRAEYQPWSIKQIIELIVFLPLNLVPYVGTIAFIMITGSRLGKLSHHRWFKLKGLDKRAKKSELRLRRWEYLWFGTVAMILELVPILSFFFLLTSTAGAAMWAAKMEERARTRVGQPITDEDRSQDVDGPIYHDDLV

SEQ ID NO: 4416 - DNA, 1467 bp, Myceliophthora thermophilia
atgggccaaattgaggcaccattgccgggagatgtggcgcggggactgccacgcccggacgcagaggacacggagacgacattagagtcggcggggatggacctcgagaaagggatcggggaagatgcgagaccgacgtcgactgacaatagcgatccggatgcgagaacagaggaaggccaaccgccggcatcacggcaacggacggccgaagatgatgacgggggaccggggagcggcggcgacggcggtggcgtgacctccggagttctgtcccgcgtcctcaccaaggccagcaccaaatccagctggaaccccggcccgccaccggacggcgggctgcaggcctggatggcggtggcgtgcacccacctggtggtcatgaacacctggggcgtcatcaactcgttcggcctcttccagacatactacacgaccgcgctgggccggccgccctcggacatctcgtggatcggctcgctgcagatcttcctcctcttcttcgtcggcgccctgaccggccgcctcaccgacgccggctacttccgccacgtcttcgtcctaggcgtctccttccagctcgtcggcatcttcaccgcctcggccgcctccagctactggcaggtcctcctcgcccagggcatctgcatgggcctggggaacggctgcctcttctgcccctgcgtctccaccctgtcgacctacttcaacaagaagcgggcgctcgccatcgccctcggcgcctgcggcagcgccaccggcggcctcgtcttccccggcatggtccggcagctgctgcccacccagggcttccccgcggccatgcgcgccatcggctacgtccagctggccaccttcgccgtcgccttggtcgggctgaagcagaggatcccgccgaggaagagcgggccgctggtggaatggaaggccttttgcgagggagagtatacgctctacgcggcagggagtttctctcctcaacgtgctgttgctcatgaacggcatcggcatccccggccgcgtgatcccgaaccacattggagaccgggtcgggaccatcaatgttctcgtcccacggcgggcctggccagcgtctgcgtcttctgctggatggccgtcaggtccaccgccggcctgtacgtgtggtgcgccttttacggcatcgtggcgggaggcatccagagcctgttccccgccggcctgagcagtctcaccaccgacgtgcgcaaggccggcgtcaggatgggcatgatcttcaccattgtcagctttgcgaccctagccggaccaccgatcgccggcgccatcatcaccgcgtccggcggcaagtattacggcgcccaggcctttgcggggtcgaccctgatgctgtcaatggctctgatggctgcggctaggaccgtcaaggtgaggcgattgatgcgggcggggcatggatccggctcggcgtggaagatgaaagtatga

SEQ ID NO: 4417 - protein, 488 aa, Myceliophthora thermophilia
MGQIEAPLPGDVARGLPRPDAEDTETTLESAGMDLEKGIGEDARPTSTDNSDPDARTEEGQPPASRQRTAEDDDGGPGSGGDGGGVTSGVLSRVLTKASTKSSWNPGPPPDGGLQAWMAVACTHLVVMNTWGVINSFGLFQTYYTTALGRPPSDISWIGSLQIFLLFFVGALTGRLTDAGYFRHVFVLGVSFQLVGIFTASAASSYWQVLLAQGICMGLGNGCLFCPCVSTLSTYFNKKRALAIALGACGSATGGLVFPGMVRQLLPTQGFPAAMRAIGYVQLATFAVALVGLKQRIPPRKSGPLVEWKAFCEGEYTLYAAGSFSPQRAVAHERHRHPRPRDPEPHWRPGRDHQCSRPTAGLASVCVFCWMAVRSTAGLYVWCAFYGIVAGGIQSLFPAGLSSLTTDVRKAGVRMGMIFTIVSFATLAGPPIAGAIITASGGKYYGAQAFAGSTLMLSMALMAAARTVKVRRLMRAGHGSGSAWKMKV

SEQ ID NO: 4418 - DNA, 3255 bp, Myceliophthora thermophilia
atggccaagaaacgaactgtgcagccttcgggcggccatgtctcgggccagtccaaccggccgttgagccgcccggcccatgcgctcacatacgagcaggtagccgctgagctcgatgcggatgttctgtccggcctccccgctcacgaagtcaaagtccggctcgagcagtatggacgaaacgacctcggcgaggaggaaggcgtgcagcccctcaagattgttgtcgcgcagatcgccaatgccatgactttggtgcttatcctcgccatggccgtcagcttcggcatcaagtcttggatcgagggcggcgtcgtcgctgccgtcatcattctcaacatcgtcgtcggtttcttccaggagtactcggccgagaagaccatggactccctccgctcgctcagctcgcccactgccactgtcgtccgcggcggcgaggccatggtcgtgccctccggcgaagtcgtcccgggagatctggttgaggtcaagatgggtgacaccatccctgctgacatcagcaattcattaactaaggtgaacaggctgatcgaggccaagaatttcgagaccgacgaggccctcctgactggcgagtccttgcccgtccgcaagcgcgaaaacgccacctttgacgacaacactgggcccggcgaccggctcaacgtcgcctacagcagctcgaccgtgaccaagggccgcgccaagggcattgtcttcgccaccggcccctacaccgagattggtgccattgcttctgccctcaaccagaaggaacgccgcgtgcgcccggtcaagcgcaagcccaatggcaaggccggccctcaccgttacctcgaagcgtacacgctcaccctcggcgacgccatcggccgattcctgggcgtcaatgttggcactcctctccagcgcaagctcagcaagctcgctatggtcctgttcggcatcgccgtcatctgcgccatcatcgtgctagccgccaatcgcttcgacacgccgcaggatgtcatcatctacgccgtcgctaccggtctctccatgatcccggcctctctcgtcgtcgtcctgaccatcaccatggcggccggcaccaagcgcatggtgcagcgccacgtcatcgtccgcaatctcaagagtctcgaggccctgggcgccgtgaccgacatttgcagcgacaagaccggaaccctgacccagggcaagatggtcgcccgcggagcctggatccccgggctcggcacctacacggtcgagctcacctctagcgagcctttcaacccgaccaagggtggcgtccgcttcgactcccgcgagccgcacgagatcaacttccgcccccgctccggcagggaagaaaaggaggaagcgggcgagaaggcacaggtctcttccccgctcgaactcctcggtgccagcaagtcccgtctgcaggagttcctcaccgtcgcctccctggccaacgtggccaccgtgttcgagaaggagggcacctgggtagcccgcggcgacccgaccgagatcgcgatccaggcggacgacggcaagacccccgagtgggaggaggttgccgagtacccgttcgacagcgacatcaagcgcatgagcgtcatcatgaagcacaacgcgaccggagagcacttcgccttcaccaagggcgccgtcgagagggtcattcgcgtctgcaccaagtaccacaccgaggacgcgccggccggttccgagggcggcgtggccgagatgacggacgagttccgacagcatatcctgtccaacatggaggtgtttgccgggctcgggctgcgcgtgctggcgctggcgagcaggaagctggacgcggccatgggtgccaacgaggacacggaccgcaacgaggtcgagcgggacctgaccttcctcggcctcatcggcctctacgacccgccccgcccggagtcggccccggccgtgcgcgaatgccacgaggccggcatctcggtgcacatgctgacgggcgaccacccggagacggccaaggcgatcgccatcgaggtgggcatcctgcccaaggcgatgcaccgggtcagcgccgatatcgcggcggccatggtcatgacggccgcgcagttcgacgccctttccgacgccgaggtagacgccctccccgtgttgccgctggtgattgcgcggtgtgcgccgagcaccaaggtgcgcatgattgacgccctgcaccgtcggggcaagtttgtagccatgacgggcgacggcgtgaacgattccccctccctccgccgcgcggacgtgggcatcgccatgggccaagccggttccgacgtggccaaggacgcctccgacattgtgctgacggacgacaacttcgcctcgatcgtggccgccatcgaagaaggccggcgcatcttcgacaacatccaaaagttcgtcctccacgtcctcgccgagaacgtggcccaggcggcgacgctcctggccggcctcgccttcaaggacaacacgtccctgtccgtcttccccctggcgccggtcgagatcgtctggatcatcatgatcacgtcgggcctgccggacatgggcctgggcttcgagcgcgccgtgcccgacatcatgcgccgcccgccgcactcgctcaagacgggcatcttcaccttcgagttcctgctcgacatggtcgtctacggcctgtggatcgccgccctctgcctgtcgagcttcgtgctccgcgtctacgcctggggcggcggcaacctggggcagaactgcaacgacaggctccacgagggctgcgagacggtcttccgcgcgcgcgccaccacgttcgcctgcctcacctggttcgccctcttcctcgcctgggaggtggtcgacgtccgccggtccttcttccgcatgcagccgggcagcaagaagtacctgacccagtggttccacgacgtctggcgcaaccagttcctcttctgggccgtcgtcttcggcttcgtctccctcttcccgaccctctacatccccgtcatcaacaccgtcgtcttcaagcacaagggcatcagctgggagtggggcatcgtcttcgtcgccgccgccctcttcttcgccggcgtcgaggcctggaagtgggccaagcgcgtcttcctccgccgccgcgcccggaagcggaccggccggctgtggaaggacatggatatcgaggagcgcgtctttggcgagtacctctccggctacgagagctccgagggcatggttgctgccgccgacgggcgtgattga

SEQ ID NO: 4419 - protein, 1084 aa, Myceliophthora thermophilia
MAKKRTVQPSGGHVSGQSNRPLSRPAHALTYEQVAAELDADVLSGLPAHEVKVRLEQYGRNDLGEEEGVQPLKIVVAQIANAMTLVLILAMAVSFGIKSWIEGGVVAAVIILNIVVGFFQEYSAEKTMDSLRSLSSPTATVVRGGEAMVVPSGEVVPGDLVEVKMGDTIPADISNSLTKVNRLIEAKNFETDEALLTGESLPVRKRENATFDDNTGPGDRLNVAYSSSTVTKGRAKGIVFATGPYTEIGAIASALNQKERRVRPVKRKPNGKAGPHRYLEAYTLTLGDAIGRFLGVNVGTPLQRKLSKLAMVLFGIAVICAIIVLAANRFDTPQDVIIYAVATGLSMIPASLVVVLTITMAAGTKRMVQRHVIVRNLKSLEALGAVTDICSDKTGTLTQGKMVARGAWIPGLGTYTVELTSSEPFNPTKGGVRFDSREPHEINFRPRSGREEKEEAGEKAQVSSPLELLGASKSRLQEFLTVASLANVATVFEKEGTWVARGDPTEIAIQADDGKTPEWEEVAEYPFDSDIKRMSVIMKHNATGEHFAFTKGAVERVIRVCTKYHTEDAPAGSEGGVAEMTDEFRQHILSNMEVFAGLGLRVLALASRKLDAAMGANEDTDRNEVERDLTFLGLIGLYDPPRPESAPAVRECHEAGISVHMLTGDHPETAKAIAIEVGILPKAMHRVSADIAAAMVMTAAQFDALSDAEVDALPVLPLVIARCAPSTKVRMIDALHRRGKFVAMTGDGVNDSPSLRRADVGIAMGQAGSDVAKDASDIVLTDDNFASIVAAIEEGRRIFDNIQKFVLHVLAENVAQAATLLAGLAFKDNTSLSVFPLAPVEIVWIIMITSGLPDMGLGFERAVPDIMRRPPHSLKTGIFTFEFLLDMVVYGLWIAALCLSSFVLRVYAWGGGNLGQNCNDRLHEGCETVFRARATTFACLTWFALFLAWEVVDVRRSFFRMQPGSKKYLTQWFHDVWRNQFLFWAVVFGFVSLFPTLYIPVINTVVFKHKGISWEWGIVFVAAALFFAGVEAWKWAKRVFLRRRARKRTGRLWKDMDIEERVFGEYLSGYESSEGMVAAADGRD

SEQ ID NO: 4420 - DNA, 2118 bp, Myceliophthora thermophilia
atggctgcagcatttcgcccagttaacagtccgctggcgacgggagaagccgctagggacactctatcgacgtcaccaatgacgccacgaccaaccaccgcgccgacccaaacgacgaaccgcttagatgagtccacaatgcccactcgcgcgagcttcggcaccggtgccttggcatctcagaagccccttccgacgtcgccctttccagagtcggtacaagtgcccgagcccgggacaaccgccccaaaaaaggaacagacacagcccccgaaggcgtccaaagatcctgataatgtggacatggaggaatctgacggggatgcgcatgccgccgatgacgctcctgcctcggaagacgaaagtgtgaacggagatggcacaaaatccaagaagaagaagtcacagcggttctactgcactgactatccgccttgtaatctaagcttcaccaggagtgagcatttagcgcggcatatcagaaaacacaccggggaacgccctttccaatgtcactgctcccgacgcttctcccgacttgataacctgcgacagcatgcccagaccgtgcacgtaaacgaagatatcccgatcgactcgctcgcggctaccggaacacggttccagagacagatcaggaccgacagggtgcgccaaccaggtaggaccagggcctcaacagcgggcagtgtcggacccggcgggcgaggtcattcaaagtcactatcgacttctagcatcaccagtgtcagctcaatcgcttcgggctacagcgtgagcgatgctcggcggaggccgccacctcttgtcatggcagatccccggtctcgaatgtcgcttgaatcgtatcgtggccccgacggccaatactacagagcaccttcaccgggagacttcagcactcccacttcagctactttctctacgggccaaaacagcccccgatggggaccagtcatgttacccgggtcatctcactcacgagcacacagcatgtacacccccggctctagaacgcccggccgccgcctgagcgtcccctccggtggcaatcctttccagtcgcctcacggtgccggtgtgagggctccgatccttggcccctcgatgttgaactcgtccaactcgggcgcattctcgccatcgcagagcagtcttctggcttcacccacaacatcgacagcgacttggtcccgccgagactccacgtcatcggcggcggacgaggcatggcgcagacgaacatggcaccccgatacacgcgattacaatggggcaagcaggctgagtcaggtcatcactccgtcacagttccctccagacaccgtcactctcccccctcccaacactgggggccaacaacaaggacagccattgcgccttcccggcatcgaatcttttgacgagttcacacgacttgcaccacccccacgaaacccctccccgatgatgattgattcggggatctccaggccgcccgcgggattccaagccggcgggaccggcacagaagaccagcggagtcgcgcgtcccagtgggattcgagcttagatcgtgggttgaacagattagatatcaatacgccgccaagagatggcgcaggtgcttgggctagcgaggcgaaccaggcgctccatgcccgggctgaacagacccgggtgaggttcgaacccgaggtcaagccctcaccggcggtgcaccctccggtggcaccgacgacacctccaaacattttcggacctcggcaccaacacactgtgtcggcgccttcctttaacacaccgcgcgagtctaggcggcatggatggtataacggtccagtctccagctatcctacgggtgaaacgatacatgaaggccgttcccacgtcgaccgtatcgttcaccctaacgtcagctccttccagggcttcccagttcgcgatcaacagcctgtcatccaccagcatcaaccgggctccccgatggagcgaactgagcgagtagagcgggtcgaacggatggaacagattcctgagcgatctccgaatcaaggaggtgaaccagaatctatgaggcgcctggaggcacttgtcgccgttgccaccggccagaacaacgccgcaaccgcttattga

SEQ ID NO: 4421 - protein, 705 aa, Myceliophthora thermophilia
MAAAFRPVNSPLATGEAARDTLSTSPMTPRPTTAPTQTTNRLDESTMPTRASFGTGALASQKPLPTSPFPESVQVPEPGTTAPKKEQTQPPKASKDPDNVDMEESDGDAHAADDAPASEDESVNGDGTKSKKKKSQRFYCTDYPPCNLSFTRSEHLARHIRKHTGERPFQCHCSRRFSRLDNLRQHAQTVHVNEDIPIDSLAATGTRFQRQIRTDRVRQPGRTRASTAGSVGPGGRGHSKSLSTSSITSVSSIASGYSVSDARRRPPPLVMADPRSRMSLESYRGPDGQYYRAPSPGDFSTPTSATFSTGQNSPRWGPVMLPGSSHSRAHSMYTPGSRTPGRRLSVPSGGNPFQSPHGAGVRAPILGPSMLNSSNSGAFSPSQSSLLASPTTSTATWSRRDSTSSAADEAWRRRTWHPDTRDYNGASRLSQVITPSQFPPDTVTLPPPNTGGQQQGQPLRLPGIESFDEFTRLAPPPRNPSPMMIDSGISRPPAGFQAGGTGTEDQRSRASQWDSSLDRGLNRLDINTPPRDGAGAWASEANQALHARAEQTRVRFEPEVKPSPAVHPPVAPTTPPNIFGPRHQHTVSAPSFNTPRESRRHGWYNGPVSSYPTGETIHEGRSHVDRIVHPNVSSFQGFPVRDQQPVIHQHQPGSPMERTERVERVERMEQIPERSPNQGGEPESMRRLEALVAVATGQNNAATAY

SEQ ID NO: 4422 - DNA, 2844 bp, Myceliophthora thermophilia
atgggtctgtacatcgttgacgacgcgtatgttgatccggtgccgcccgcggatgcatgggctgccttcctggcttcgagattctccaagagaaaggagctgtacgagaagttctcggaccatgagcgagagatcgtcaggaaggagctgcgccgtatccggcacctgagggagtacttcgaggagcaccggctctccgggaccgactcgaccactctgctcgcgtccctggagaaagcccaccatgcctggagaagccaggccggccggggctgcaaagaggaactccaccggcttgaggtgggaatcgctcggtcaagcggctaccgcagacagcagctcaacaggcagcgcttgatcctgaagaaagtagagcagtggtcacagccaaactaccaatacgaggagctccggaactcggtggccccggagagcttcgttcccgggctcgacgccatcgactacaacgtcgacgacaacccggccgagcccaactatggatacaatggctggatcatggccttcaaaaagggcaagggtggcgtcacgctcgaccacccgctaaaacacggcaagtttccgcatcagaagatcgcgatgcagaaattgttgtacgacgaggaacgaacgcccctgaagagatcgcctgacaggacacagctacgatacttccacctgcaggccaataacatgaaatgggtagaggtagctagctcaccaagctattattcctcacgcttcgaggacgccatcgcgagatattatgaagaggacagctcccagctggatcccacacggggcctgtctcagcgcgggctctaccagccgagtaccaagaaaacgcagtcaaacacggagaaactcctgaagagggagctctggcacggacaggaaaggggcggaggcagcaaccacctgccacctcactcgcgccagatccgtccccgctgcgccttcgtgccgtcggcgccgtggaaagaagacactggcgaccagccgggcagcacaccccaggaccacggtcaaggccagggccaagtccgtcactctgagggatcgttacaagagacgactgagacgtatcttcggtcctccgagtctcgggatattgtgctattcatgccctacttgcactgggaaatcgagaagcggctggcgaggatgaccaacgtcatccgaaagacgcagcatgtgcacgagaggcagtttgcctttgagcgcgacagcaagcggagaggaacctggagctcggtggtcgagcgggcgagggccatggccagccgcatggacagcaccgcctcggagctcggcggttggagctacgacgcgcccccctggcggccgcagtctcctctcgggcgctacatctggctggccgccaagctctaccagctcatcgacgaggcggccgactggcgtctcatcacggaccacttgtgcacccagtcccctctccatccccgccgcacgctcgagcagtactacaactggacctcggaagacacggcccaccgagaccggcagcaggtcgtctaccgcgggacgcgcatgagaaacgaccccgaggccattcctagggtggtggtggtcgaccagttatggctatggatcttggatgagaacaccatcctcacagcgttcccccggagatggggccgtaataacccggacccatcggctgtccacagggcaattcgagaccgtctcggtgcagccgacaccaagcagatcacgtccatctacgagctggccctggtcatcatcgacgagtgctccaaggtgttctttgaccggaccaaacccgacctccgacccgaagtggtcgacatgtttggctccgccatttccaatatctcggagaagaagacggaggcgtacgagcgcttcggccgcgacgtcaagaggatgaacaaccaggaccccctccagacggacgaggagctcctgcgcaagacgctcaacatcaagtttgagtggtcggttctaatggaggcccaaaatgtcatcgatcagctgcagatcatgcaggagatcttcacgcagcagatcaccgtcatgggagacttcgagaaggccctgcggggcttgagctccgaccccccagacggcttgaagacggccatcgacagggcggggcagttgatcttggacatgaagctgcgacgagacgagctggcaaatctcgagaagcggcaggcaaacacgagaagtcagctccgtgaactgctcgatatgaaacaacagcaggctggtatcatcgaggcaaaggcggcaatccgcagggcagatgagactgtcatccagggcagatccatcgtggtgttcaccgtcgtgaccatcttcttcgtacgtcgaatgccaccaacagagccccttggaacaagaaggttccgaggccagattactgacatgtcatattcagctaccgctctccttcttcgcgaccgtgttcggtatgaacgcccaggaactcgacagcgggacgatgagcatgggcacacagttcatgtggatgttcgtcctctcgagcatcgtgatcaccttgtcgctcgccctcgccttcaacgagcaggctcggcaatgggtattcagggcgttccggtcatgcttcgtcttcctcatacgcccggtggtgaatcggaacaagaacgacagcagcaatctcgccgccgcgtcgccgcgtgcgatccgcgagttcatgctcaccaaacagaaggagtgggagggcaccgacggggcaacttccaccggctcactcccgctgcatcggaacgaggagccgaaaaagggggtcacggcaaggttgacacagttgtggaggcgggagtcggtttgagtctataa

SEQ ID NO: 4423 - protein, 947 aa, Myceliophthora thermophilia
MGLYIVDDAYVDPVPPADAWAAFLASRFSKRKELYEKFSDHEREIVRKELRRIRHLREYFEEHRLSGTDSTTLLASLEKAHHAWRSQAGRGCKEELHRLEVGIARSSGYRRQQLNRQRLILKKVEQWSQPNYQYEELRNSVAPESFVPGLDAIDYNVDDNPAEPNYGYNGWIMAFKKGKGGVTLDHPLKHGKFPHQKIAMQKLLYDEERTPLKRSPDRTQLRYFHLQANNMKWVEVASSPSYYSSRFEDAIARYYEEDSSQLDPTRGLSQRGLYQPSTKKTQSNTEKLLKRELWHGQERGGGSNHLPPHSRQIRPRCAFVPSAPWKEDTGDQPGSTPQDHGQGQGQVRHSEGSLQETTETYLRSSESRDIVLFMPYLHWEIEKRLARMTNVIRKTQHVHERQFAFERDSKRRGTWSSVVERARAMASRMDSTASELGGWSYDAPPWRPQSPLGRYIWLAAKLYQLIDEAADWRLITDHLCTQSPLHPRRTLEQYYNWTSEDTAHRDRQQVVYRGTRMRNDPEAIPRVVVVDQLWLWILDENTILTAFPRRWGRNNPDPSAVHRAIRDRLGAADTKQITSIYELALVIIDECSKVFFDRTKPDLRPEVVDMFGSAISNISEKKTEAYERFGRDVKRMNNQDPLQTDEELLRKTLNIKFEWSVLMEAQNVIDQLQIMQEIFTQQITVMGDFEKALRGLSSDPPDGLKTAIDRAGQLILDMKLRRDELANLEKRQANTRSQLRELLDMKQQQAGIIEAKAAIRRADETVIQGRSIVVFTVVTIFFVRRMPPTEPLGTRRFRGQITDMSYSATALLLRDRVRYERPGTRQRDDEHGHTVHVDVRPLEHRDHLVARPRLQRAGSAMGIQGVPVMLRLPHTPGGESEQERQQQSRRRVAACDPRVHAHQTEGVGGHRRGNFHRLTPAASERGAEKGGHGKVDTVVEAGVGLSL

SEQ ID NO: 4424 - DNA, 579 bp, Myceliophthora thermophilia
atggcagccgcactcttcgtgatagacgtccagaatgatttggcaacggatccagcgaccaggattcctcatgcttcccgtataaacacctccggcgagaagatcatttccgccgcccgagctgcgctacagcgagccgagaacaacaacaccagctcccgtctcaagacaattgtgtttgtgcagcatgaggagaaaccagaagacggcaccttggtcaggggcagcgatccgtggaaactggtttttgaaccgctcccgggagatgctcgagaacgtctagtcgccaagtggacacgcgacactttcgaatctaacccagacctcgcttccgagctcaaagcatccggcatcgaggagatcatcgcattcggcatccaatccgagtgctgcgtcgagtccacctgcgcgggtgccctcgccgccgggttccgagtcacactcctctctggggcgcactcgacctacgacaacggggccaagaaggccgaggagctcgagcgcgaggtggaggagcggttgcgactcaagggggccaaggtcgtgccgtgggaagaagtcgttgcagcctggccgtga

SEQ ID NO: 4425 - protein, 192 aa, Myceliophthora thermophilia
MAAALFVIDVQNDLATDPATRIPHASRINTSGEKIISAARAALQRAENNNTSSRLKTIVFVQHEEKPEDGTLVRGSDPWKLVFEPLPGDARERLVAKWTRDTFESNPDLASELKASGIEEIIAFGIQSECCVESTCAGALAAGFRVTLLSGAHSTYDNGAKKAEELEREVEERLRLKGAKVVPWEEVVAAWP

SEQ ID NO: 4426 - DNA, 471 bp, Myceliophthora thermophilia
atgggctcgaccacgctcctccgcggcttcaaagtctcagtcgccgtcctcgacgccttcctcgcagccaacaaggttgacgagacctacggcaccccgcccttctacaaagatcaccccgaccgcgaccccatctcgaagctcctcttttccaagattgctcgcttcgacgagaacgcggataagaacaagtttcgcgtcgtaatcccctccgtcgagagccgagatatcgccaccaccgcatacgtcacgtacgcatgggcgagcgtcgtcgcgcatcgcgaggtcgacctagagcatgacctgcctgctgagcttccgaaaggttttgaggagctcaggtcggaaattctatcttttagcgacaaggtggaggcaaaggacaggattgcagacgatggaaagataggggtgtatcttgttgtcacgtacgggcttcgcggtcatcgtggtccgccagaggatcagtga

SEQ ID NO: 4427 - protein, 156 aa, Myceliophthora thermophilia
MGSTTLLRGFKVSVAVLDAFLAANKVDETYGTPPFYKDHPDRDPISKLLFSKIARFDENADKNKFRVVIPSVESRDIATTAYVTYAWASVVAHREVDLEHDLPAELPKGFEELRSEILSFSDKVEAKDRIADDGKIGVYLVVTYGLRGHRGPPEDQ

SEQ ID NO: 4428 - DNA, 243 bp, Myceliophthora thermophilia
atgctctccacgaagaagcgcaccacggcccaacagcctgctgctccagcagcatctaagactaagactctagctcggccaccgcctggaatccagacttggcaagacctccaaaaggccaaccccactctatacgccaggatcgtgaatgcctctaagctactggaaagtctcaagaaggctggcatgattaagccattcaagcccaattttgcacgaatcaatgtcggttcgaggcgttag

SEQ ID NO: 4429 - protein, 80 aa, Myceliophthora thermophilia
MLSTKKRTTAQQPAAPAASKTKTLARPPPGIQTWQDLQKANPTLYARIVNASKLLESLKKAGMIKPFKPNFARINVGSRR

SEQ ID NO: 4430 - DNA, 3801 bp, Myceliophthora thermophilia
atgactgacctctctctctcctattactttcttccgcagcccgaaagctccaccgcgccaacagcaacaaagcgcgataatgactcggcgacacaactggccgccactggccgcggccaaaaggtcaagggagcgttccagctcaacgtccacgatgcgctgagcccggacccgactaacgaggacatgtacgacgtccccgacaacaagttcgccttctctcccggccagctttccaagctgctcaaccccaagagtctcgacgccctctacgcccttggcggcctggccggcctcgagaaaggcctgcgcaccgatcgccatgccggcctaagcaccgacgagagcgcccttgacggcaccgtcaggttcgaagacgtcgcgccccagggcgtccccaagtatggctccaacggcgatacattgcccgtcgccgccaaggccggggacgccaaacccgccaccgccccggcgcccgcgcaccacgcgggcggccagttcgctgaccgcaagcgcgtgttccgcgacaacaggctacccgagaagaagccaaagtcgttgctggagctggcctggattgcctacaacgacaaggtcctgatcctgctgaccgtcgccgccatcgtgtccctcgccctcggtctgtaccagacttttggcgtcgaccacgagccgggcgaggccaaggtggaatgggtcgagggcgtggccatcatggtcgccatcttcattgtcgtggcagtgggtaccctgaacgattggcagatgcagcgccagttcgctaccctcaacaagaaggccggcgaccgcaccgtcaaggtcatccgctctggcaagtctgtcgagatctccgtcttcgacatcatggtcggcgacgtcatgcacctcttcaccggcgacatggtccccgtcgatggcatcttcatcgacggccacggggtcaagtgcgatgagtcttcggccaccggcgagtcggacctgctcaagaaggttcctgctgacgacgtctttgcggttctggaggatgtcgccaaagggggcaagccgccggccgacatcgagaagctcgaccctttcatcatttcgggcagcaaggtcaacgagggtaacggtactttcctggtcactgctgtaggtgtcaactcgagctacggccgcatcatgatgtcgatgcacacggaccaggaggacacgccgttgcagaagaagctcaacatcctcgccgactggattgccaagtttggcgctggcgcggcgctcctgctgttcatcgtcctcttcatcaagttcctggctcagcttcccaacaaccacgacactcccggccggaagggccaggacttcctgcggctcttcatcacgtcggtcaccgtcgtggtagttgccgtcccggagggcctgcccctggccgtcacgctcgctcttgcatttgcgactacgcgcatgatgaaggacaacaacctggtgcgcgttctgaaggcgtgcgagacaatgggcaacgccactgccgtctgctccgacaagaccggaaccctaacgcaaaacaagatgacggtcgtggcgacgactctcgggaagagtctctgctttggcggcaccgatgcccctctggaggaggaagaggaggcggacaaagccgccaaggccgtcgagattattaacatcccgaacgtcaccgtcagcgagttcgtcaaggccctgagcgacacaaccaagcagctcctcatcgaatccaatgcggtaaactcgaccgcttttgagggcgatgtcgatggcgagaagaccttcatcggctccaagaccgaggttgctttgctcaccctctgtcgtgaccatctcggtgccgggccccttcaggaggagcgcgcaaacgccaatgtcgtccaggtcgtgcccttcgactcggccgtcaagtacatggccaccatcgtcaagctgcccaacggcaaattccgtgcctacgtcaagggcgcctccgagatcctgctcgcaaagtgcacgcgagtcattgccgatcctgccggcgaggagctggcgacgaccgccatgaccgaggacgaccgtgccgtcttttcgcagaccatcacttcgtacgccggccagaccctccgcaccatcggctcgtcctaccgtgactttgattcctggccgcccccggagctcgccggccagcaggacctgacggccgccgagtttgacaaggtgcacaacgacatgaccctcgtagccatctacggcatcaaggacccgcttcggccctccgtcattgacgccatcaaggactgccgccgcgccggtgtcaccgtacgcatggttaccggcgacaacatcctcaccggccgcgcaatcgccaaggagtgcggtatctaccatcccgaagaaggcggcatcgccatggagggccccgtgttccgccgcaagagcgaggaagagctcaagaagctcgtgccgaagctgcaggttcttgctcgctcgagcccggaggataagcgcatcctggtccggatgctcaaggagctcggcgagacggttgccgtgaccggcgacggcaccaacgatgcgcccgccctgaagatggccgatatcgggtttgccatgggcatcgcgggcaccgaggtggccaaggaggctgcggccatcattttgatggacgacaactttgcatccatcgtcaagggcatcagctggggcagggccgtcaacgacgccgtcaagaagttcttgcagtttcaactcaccgtcaacgtcacggccgtcgttcttaccttcgtctcttccgttgccagcgacaaagagcagtccgtgctcaacgcggttcagcttctctgggtcaacctcatcatggatacatttgctgctctcgccctcgctaccgacccaccctcgccatcggttttggaccggaagcccgataggaagacggcctccctcatcagcacccgcatgatgaaaatgattattggccaagccatctgtcagctcgccatcaccctcgtcctcaacttcgcgggtgcttcgttgctcgactacgaggtgtccaactcggtgcaaaatgttcgtgaacacgagcaggagcgcctgcggactctcgtcttcaacacttttgtctggttgcagatcttcaacgagctcaataaccgccgccttgacaacaagctcaacatcttcgaaggcattacgcgcaactacttctttatcattatcaatctcatcatgattggcggccaagtcctcatcatcttcgtcggcggcgaggccttcaagatcacgcgtctgaacggcaaggaatggggtctttccatcggcctcggcgccatttcccttccctggggcgctctcatccgcaagttccccgacgcctgggcggaggccatggttccgcatatgccaacccccaacgtctggcctttcaaccggaagaagaagaaggaggccgcgctcgcagaggagcaggacgtcgagaaggcagagagggccacgtcggcatccgacgagaccggggcgctgcaccagaagcagaggaagaggaccacgctgcccgtcgatggcgagccgggcgattatccgtttgagcccccgctgcgcacgctgaccagcctgaggggcaagcgcgcgtcaacgcatatatcgcaagtacgcagcgggttccgggggtatgtgcacgacaagaaggaccagatgaaagcgaaggccaagggaatgtctgcgagcaagacgaacgtgtcggcccacgtggtcgtgcctgcgtccgtcgctgccgcgcctggcatcgcggggaagggccccgacgtggcgcactaa

SEQ ID NO: 4431 - protein, 1266 aa, Myceliophthora thermophilia
MTDLSLSYYFLPQPESSTAPTATKRDNDSATQLAATGRGQKVKGAFQLNVHDALSPDPTNEDMYDVPDNKFAFSPGQLSKLLNPKSLDALYALGGLAGLEKGLRTDRHAGLSTDESALDGTVRFEDVAPQGVPKYGSNGDTLPVAAKAGDAKPATAPAPAHHAGGQFADRKRVFRDNRLPEKKPKSLLELAWIAYNDKVLILLTVAAIVSLALGLYQTFGVDHEPGEAKVEWVEGVAIMVAIFIVVAVGTLNDWQMQRQFATLNKKAGDRTVKVIRSGKSVEISVFDIMVGDVMHLFTGDMVPVDGIFIDGHGVKCDESSATGESDLLKKVPADDVFAVLEDVAKGGKPPADIEKLDPFIISGSKVNEGNGTFLVTAVGVNSSYGRIMMSMHTDQEDTPLQKKLNILADWIAKFGAGAALLLFIVLFIKFLAQLPNNHDTPGRKGQDFLRLFITSVTVVVVAVPEGLPLAVTLALAFATTRMMKDNNLVRVLKACETMGNATAVCSDKTGTLTQNKMTVVATTLGKSLCFGGTDAPLEEEEEADKAAKAVEIINIPNVTVSEFVKALSDTTKQLLIESNAVNSTAFEGDVDGEKTFIGSKTEVALLTLCRDHLGAGPLQEERANANVVQVVPFDSAVKYMATIVKLPNGKFRAYVKGASEILLAKCTRVIADPAGEELATTAMTEDDRAVFSQTITSYAGQTLRTIGSSYRDFDSWPPPELAGQQDLTAAEFDKVHNDMTLVAIYGIKDPLRPSVIDAIKDCRRAGVTVRMVTGDNILTGRAIAKECGIYHPEEGGIAMEGPVFRRKSEEELKKLVPKLQVLARSSPEDKRILVRMLKELGETVAVTGDGTNDAPALKMADIGFAMGIAGTEVAKEAAAIILMDDNFASIVKGISWGRAVNDAVKKFLQFQLTVNVTAVVLTFVSSVASDKEQSVLNAVQLLWVNLIMDTFAALALATDPPSPSVLDRKPDRKTASLISTRMMKMIIGQAICQLAITLVLNFAGASLLDYEVSNSVQNVREHEQERLRTLVFNTFVWLQIFNELNNRRLDNKLNIFEGITRNYFFIIINLIMIGGQVLIIFVGGEAFKITRLNGKEWGLSIGLGAISLPWGALIRKFPDAWAEAMVPHMPTPNVWPFNRKKKKEAALAEEQDVEKAERATSASDETGALHQKQRKRTTLPVDGEPGDYPFEPPLRTLTSLRGKRASTHISQVRSGFRGYVHDKKDQMKAKAKGMSASKTNVSAHVVVPASVAAAPGIAGKGPDVAH

SEQ ID NO: 4432 - DNA, 729 bp, Myceliophthora thermophilia
atggagacgcctccgcccggaccacgggcgatgatggttgacatcggggaacagcaaatcgtccacaacgaaggttgcgacctgcattacgggtaccaagacaaggggccgctcatcaccttcatccccggcggcaacggccacgggcggcagttcaacaaaatgatggccgcgctgtccggcaggttcacctgcgtcacctttgaccggcgccagatgtcggcaagcagagtgccatgggcttcgacaagtccatccttctttggcagcagcggcggcggcttcttcgccttccagttcgccctcgacttccccgacatggccgaccacctgatcgccaccgtcggccttctccccgatgcttccgccctgctggactggttcaatcatctcttggaggtgtacgagacccgcgggttggaggaaacgtccacggaaccgccagagccggagaacgtccgaatcttctgggccaacgagatccccgttcttgtggcgtacatccccaacttttgccggttgaaggagaacaagaccagtagcggtctaatgaggaggatccgttgcagggaccccttctttgccagggcaacggtcgagcaggcaaagatcctggactgtcccctgcatgtagtcccggggcatcaccaatggttcgagattgagaccaaggaattccatttcccggacatgctggagaccctgataagaaagagaaacggcagctag

SEQ ID NO: 4433 - protein, 242 aa, Myceliophthora thermophilia
METPPPGPRAMMVDIGEQQIVHNEGCDLHYGYQDKGPLITFIPGGNGHGRQFNKMMAALSGRFTCVTFDRRQMSASRVPWASTSPSFFGSSGGGFFAFQFALDFPDMADHLIATVGLLPDASALLDWFNHLLEVYETRGLEETSTEPPEPENVRIFWANEIPVLVAYIPNFCRLKENKTSSGLMRRIRCRDPFFARATVEQAKILDCPLHVVPGHHQWFEIETKEFHFPDMLETLIRKRNGS

SEQ ID NO: 4434 - DNA, 576 bp, Myceliophthora thermophilia
atgccagtccccacgaccagagaggttgtgccgggggcgctcgtgaacattgttctcaaagccgaccagcgcacaggtcgcacagttcaaggcgcggtcgcccagcttctgaccaggggaaaccatccgcgaggcatcaaggtgcgcttggcggatggcagggttggccgggttcagagcatggcgggggacgccgcgttagccgggccgctagatcagcttggcggcgaaccagagatgattttcggtccggcgccggcgggctttccgcagggccgccggggaggacgacgacactacacggatatgagacaagagccaccgccgccgtccacacagccggtcggtctcgatgcttacatcaagccttccaaacgacgcggcaacagggggtcgaaggcaggcaacagcacaattgacgacgcaaacgacgagagctcgctcgaagctcccatgcaacctgctaatgcgcacttgcgttccgggcaagacgagtcgatatgccctgtatgcggcgacttcagaggcgatgcggcagctctcacataccatgtgcagactcacttcgacgactaa

SEQ ID NO: 4435 - protein, 191 aa, Myceliophthora thermophilia
MPVPTTREVVPGALVNIVLKADQRTGRTVQGAVAQLLTRGNHPRGIKVRLADGRVGRVQSMAGDAALAGPLDQLGGEPEMIFGPAPAGFPQGRRGGRRHYTDMRQEPPPPSTQPVGLDAYIKPSKRRGNRGSKAGNSTIDDANDESSLEAPMQPANAHLRSGQDESICPVCGDFRGDAAALTYHVQTHFDD

SEQ ID NO: 4436 - DNA, 2949 bp, Myceliophthora thermophilia
atggacgagaagagcagccttccggcacaccgagagtcccccgcccccacttccgggaggccgcgatggcggcgacagaaaccgcgaagatccagcgcactgcgcttcttggcgctgggctgtttgtgtttcatcgcattcgcccagtggaagcagctgtcgcaccggccgctgccgcccagaaacccggacatcacgctgcacggcctctcggtcaagcggttgcaggacgatctggccacctgtgcgaaactgcgcaagactccgcaggaccccatcggcctcggccgggagcgcaacgcacgctacatcgacggccatgcgccgacactcatcaagaacgcgaccgtgtgggtcggcgaaccggccccgggcactcccccggatgcagcacggaagggggccggttacagctggatcaaggccgacgtgtacctggagcacgggctgatcaagcgcgtcgaggacaacatcgaactcttcacggtcgcctgggacaccgaggtttacgacgccaagggacgccccctgaccgcgggcatcatcgacatgcacagccacgccggtgtcgactcgctccccagcctccgggggaacgaggacaccaacgagatggcgtccgacatcacgccgtacgtccggtccatcgacggcatcctgcctctggaccaccagatccaggtcatcaagtcgggcggcgtcaccaccagcctggtcctgcccggatccgccaataacatgggcggcgaggcatacgtcatcaagcacgctgtgggcaggccggacgggcgcaacgagaccagcgccgccgacatgctggccgacccggaccgcaactggcgcttcatgaagatggcctgcggcgagaaccccaagcgcgtctacggcgacccgggcaagcagggacccaccagccgtctcggcgagagctgggagttccgccacgccttcgagcaggccgccaagctggtccgggagcaggacgactggtgcgacgccgccgccgcccgcggcgtccaccacatgaagtcctacctgccccaggagctccgctgggagtcgctcggagccctgctgcgcgaccaggtcaggttgaacacgcactgttacaccattcccgacctcgaggcctttgtggaccacaccaacgagttcaagttcaaagtccgagcctttcatcacgctcaccagacatacctggtcccggaaatccttaagcgggcgtacggacgggagcctccagcctccgccttgtttgcggacaacatgtggtacaaggccgaggcaaacacggcatccgagtacgccggcaagatcctttacgacaacggcttgacgcccatctacgtcagcgacaacccggtcctcaatgctcaacatgtagtgtttgaggctgccaaggcgtacaagtacggcctgccataccatgctgcgttagcctctgtgaccacggcccctgccgagcggctcgggttcggcaacaggctgggcaaggttaagccgggctttgatgccgacgtcgtcgtctgggatagtgatcccctcagcgtgggtgccgctcccgtgcagatctggatcgacgggacggcccaatacgaagacccagtggagctgaagaagccggctcccgaaccgatcgtccccgacgagagcctctccaagatcccggaaggtccagtagccatggatgaggtcatcttcaccggcgtctccaaggtcttgctcaacaaaaacgtcgagtctttatctgccaacaatatcgtcgtcgtgtccaagggcaaggtgacgtgcattggcgcttgcgagtccgagctgcgagccgccgccgaatccaacacgccggtcgtcaagctgaaaaacggctaccttaccgagtccttcaccgtcttcggttccaagatcggcctgaacgccgttgacgccgagagcgcgaccgacaacggcgccagcggcagcgccttcacccgcgccgaggatggtctcgcgctcgacacccaaaagaccaacgtgtcgtacgcctacggcgtcaccaaggccatctcggccccgaagctgagcggtcaggacaccaaccacggcaccagcgccatctcggccccgaagctgagcggtcaggacaccaaccacggcaccagcgtcggcttcctcactggcgcacttaccccgctctccgaacacgccgtcttcgcgtcagacgccgccgtgcactacaccctcaccccgtccgtcaagtccgcctcgctgccggacgtgtcctccatctcggccgccgtcgccgctctccggcgcaagctcctcgctgccgccgtcgccgcccgcgccgcggcccccgtagacgaccggtactcggaagacgcctacctgcgccgcgtcgtcaacggctcgctgccgctggtggtcacggtccactcggccgacaccatagcggccctgctcaaggtcaaagcggccgtcgagaaggagttggaggagcaaaaggaaggggcgccggcgcgccggctgcgcctggtcatccacggcggcgccgaggcgcacctgctggcgcgggagctggccgaggcccaggttggcgtcgtactggcgccgctgctgtcgtacgcggcctcgtgggaccagcggcgggcgctgacgggcgcgccgctgacgcgcgggaccgctgcggacaggctgctcgacgccggcgtgccgaccgccgtcggcccggacgaggactgggtcgtccgcgacctcggcctgctggcgggcatcgtgtggaagaacggcgagggccgcgtcgacgagcgcgccgccctccgcctcgtcggcgccaacctgtatgacctcctcggcctcgaggagcccggagtcgaccagggccactttgtcgtctgggagggcagcccgttggagatcgacgggcggctgaaggctgtcggtgggggtaggggttgggttgacgtttgggagtga

SEQ ID NO: 4437 - protein, 982 aa, Myceliophthora thermophilia
MDEKSSLPAHRESPAPTSGRPRWRRQKPRRSSALRFLALGCLCFIAFAQWKQLSHRPLPPRNPDITLHGLSVKRLQDDLATCAKLRKTPQDPIGLGRERNARYIDGHAPTLIKNATVWVGEPAPGTPPDAARKGAGYSWIKADVYLEHGLIKRVEDNIELFTVAWDTEVYDAKGRPLTAGIIDMHSHAGVDSLPSLRGNEDTNEMASDITPYVRSIDGILPLDHQIQVIKSGGVTTSLVLPGSANNMGGEAYVIKHAVGRPDGRNETSAADMLADPDRNWRFMKMACGENPKRVYGDPGKQGPTSRLGESWEFRHAFEQAAKLVREQDDWCDAAAARGVHHMKSYLPQELRWESLGALLRDQVRLNTHCYTIPDLEAFVDHTNEFKFKVRAFHHAHQTYLVPEILKRAYGREPPASALFADNMWYKAEANTASEYAGKILYDNGLTPIYVSDNPVLNAQHVVFEAAKAYKYGLPYHAALASVTTAPAERLGFGNRLGKVKPGFDADVVVWDSDPLSVGAAPVQIWIDGTAQYEDPVELKKPAPEPIVPDESLSKIPEGPVAMDEVIFTGVSKVLLNKNVESLSANNIVVVSKGKVTCIGACESELRAAAESNTPVVKLKNGYLTESFTVFGSKIGLNAVDAESATDNGASGSAFTRAEDGLALDTQKTNVSYAYGVTKAISAPKLSGQDTNHGTSAISAPKLSGQDTNHGTSVGFLTGALTPLSEHAVFASDAAVHYTLTPSVKSASLPDVSSISAAVAALRRKLLAAAVAARAAAPVDDRYSEDAYLRRVVNGSLPLVVTVHSADTIAALLKVKAAVEKELEEQKEGAPARRLRLVIHGGAEAHLLARELAEAQVGVVLAPLLSYAASWDQRRALTGAPLTRGTAADRLLDAGVPTAVGPDEDWVVRDLGLLAGIVWKNGEGRVDERAALRLVGANLYDLLGLEEPGVDQGHFVVWEGSPLEIDGRLKAVGGGRGWVDVWE

SEQ ID NO: 4438 - DNA, 198 bp, Myceliophthora thermophilia
atgtatatttccgtgacacgatgcccctccttcaaggctttcgacccgaaagcctatcttaggccgtttcaaatagcgctaacaacccttacaaagcgttcggtaaaaagatccgtgaagaccaaggagcgtattgccctggctactgctattaacgagctagggttcgaaataagtcaaagcgccttaaccgattag

SEQ ID NO: 4439 - protein, 65 aa, Myceliophthora thermophilia
MYISVTRCPSFKAFDPKAYLRPFQIALTTLTKRSVKRSVKTKERIALATAINELGFEISQSALTD

SEQ ID NO: 4440 - DNA, 348 bp, Myceliophthora thermophilia
atgtacgcactgtataaaaagctcaaaaaggaactcgagtttattaagactagaataaagaactactataacaaatataggctcgagggacctcgcctagagaggggagacaaagtctacctgattgtatggaacttacaaaccaaacgactaagcacgaagctagactttaagaaggtcggaccctttgttattaaagaacgaatttcgacatctaactaccgactatcgttactatcatctatacgactacggatagatgttttttatatttcacttctcgaaccagcaccaaaaaatgctaaggttgctatatatatcgaagcaaaggacaaagaagaagaataa

SEQ ID NO: 4441 - protein, 115 aa, Myceliophthora thermophilia
MYALYKKLKKELEFIKTRIKNYYNKYRLEGPRLERGDKVYLIVWNLQTKRLSTKLDFKKVGPFVIKERISTSNYRLSLLSSIRLRIDVFYISLLEPAPKNAKVAIYIEAKDKEEE

SEQ ID NO: 4442 - DNA, 198 bp, Myceliophthora thermophilia
atggttcagaacggaggtgacttcgacctcgacatcgacatggctaccaaccttaatgataacaagtttccagacgacaaagctaaagtcttctacgtagccacgagactagagggcaaggcacttagatggttcgagcctacgtggaacgactatcttacagaggaagataaagacgatcgagacgcgtttatatag

SEQ ID NO: 4443 - protein, 65 aa, Myceliophthora thermophilia
MVQNGGDFDLDIDMATNLNDNKFPDDKAKVFYVATRLEGKALRWFEPTWNDYLTEEDKDDRDAFI

SEQ ID NO: 4444 - DNA, 324 bp, Myceliophthora thermophilia
atgtcgtacgtgtatctgccgtcgaaggtgtccacccaggcgagaggcacggcggtgacgcagccgccgtcgaagcggaggtcgcaggggaacaggaggaccccttggtggtgtgctgtgcctcgcgatcttgttctggtgggagagcaggctccgctcctcctcggccccggccacatccggccttcccccgcggaagcgcgccacgtcatcgagcacccgctgccacccttgctcatccgccgctcgtggtggacgggaacctctgtcgggaacactccgcaagcactccctagtacggacgtagaggggttcctctactga

SEQ ID NO: 4445 - protein, 107 aa, Myceliophthora thermophilia
MSYVYLPSKVSTQARGTAVTQPPSKRRSQGNRRTPWWCAVPRDLVLVGEQAPLLLGPGHIRPSPAEARHVIEHPLPPLLIRRSWWTGTSVGNTPQALPSTDVEGFLY

SEQ ID NO: 4446 - DNA, 357 bp, Myceliophthora thermophilia
atgggcgatgggccgggaagcgggacgatgcgacaccaccagaacgattcccccccggctccggcgctcgtttgcccgtcgatcctcgcaaaaccctatcagatctggggaaggaatccagggtctcccggtgcccctagttcggcaacggcgtcaacggcgtcgggatcattccgttcctggatgtctgtactgtactgtatttctcccgcaacctcgccaggccaggcccgcctccagcgaccagcccttgatctcgcagaccctgcgtcggatgtcctcgagcacccgatccatgtccccaccagcgcaattcaaatgcaaatcgctcttgacaagcggccggaagtgaggtga

SEQ ID NO: 4447 - protein, 118 aa, Myceliophthora thermophilia
MGDGPGSGTMRHHQNDSPPAPALVCPSILAKPYQIWGRNPGSPGAPSSATASTASGSFRSWMSVLYCISPATSPGQARLQRPALDLADPASDVLEHPIHVPTSAIQMQIALDKRPEVR

SEQ ID NO: 4448 - DNA, 189 bp, Myceliophthora thermophilia
atggctcagaacagagctcggatcaaggaactcgaaaacggcgaaaagtactcgcagaagctagttaacgaggcctatgctaaaatcaaggcactcgagggcgccaaagcgagccatattaagatcgaactacctagcaaatacggaggaactaaggaggatcttgtaggattcctaacgaacctctga

SEQ ID NO: 4449 - protein, 62 aa, Myceliophthora thermophilia
MAQNRARIKELENGEKYSQKLVNEAYAKIKALEGAKASHIKIELPSKYGGTKEDLVGFLTNL

SEQ ID NO: 4450 - DNA, 276 bp, Myceliophthora thermophilia
atgaagccttcttcatctacaactggtacctcggataagatcttcaggcctgcgcaactccagatgatcgtggcaacgtctccgccggggtgcggcgacggcgtgcaggtgttcaacccatcggggaagctgatcggaaagatctatttcgggagcgtgtcggccaatttccagttcgcgggcgggggccagatcgtgatcctggctaagacggagctgtactatgccatgctggcggcggagggggcgttccccggaaagttgtaccccgagtga

SEQ ID NO: 4451 - protein, 91 aa, Myceliophthora thermophilia
MKPSSSTTGTSDKIFRPAQLQMIVATSPPGCGDGVQVFNPSGKLIGKIYFGSVSANFQFAGGGQIVILAKTELYYAMLAAEGAFPGKLYPE

SEQ ID NO: 4452 - DNA, 1101 bp, Myceliophthora thermophilia
atgccttcgccgcccagcaccgtcgccccgcagctccagacatggaggccccctacggacccggacaaaccagcctgcccctaccaaacgggcttcacgatcgacatcaagagccacaccccgcccgccccttttggcgggcgagactacggccccgggacacgggttgtcgtgcccgaccaggctctgcggtcgctcaagcagaccgagctcgtcatgggcaacccaccgctgagaacagcagacccggccgccccgcgcacccataccttgtccgtgacccacgagctcgccgtcgccgacgggcgaggcgcccagctggtcctctgcaccatcacgccaaaagtccccgctgggcaggccgccttccaggcagtggccaagatatacgatccgctgtactactcctttcccaacaaggacgtgccgagcgtgccctgcgatgtcacctggcttgccgatgaggactacagccgcgaggccgccgcgtacgagcatctgcaaagcatcgggaaggccggatcctttgcgcccaggtactttggctcctggacttttaccgcccgcatcctgatcgacaaaacgacgccgcggtcccgtccggtgcgcctcatccttctcgagtacgtccgggggccgagcatccgcgagctctgtcccgcaccccccgctgccgccacgtttgacgaggcataccgcctggaggtgctcgcaagagtcttggatggcgatgcaaagctgcggttcaagggcatcaaccagcgcgatctggctgcacgcaacgtccttctcaattaccctcccggtctcccgccagcagagcggcacaccatgatcccacggctcgtgctgattgattacaacatttcaatcgtctacgcgaggacaaaacgcaagatcggaccctatcatggcacgacgctcccgccaaaccccatgcagattcactggaccaacccgctgcaggagttccgcggttggatcccggccgagtgggaagccgcccccaggttgcgccaggaatggctgagcaagcgcttcggaggcaagaatatggccagttatgcccccatcacggcaaagctcgagttcgcaaaatag

SEQ ID NO: 4453 - protein, 366 aa, Myceliophthora thermophilia
MPSPPSTVAPQLQTWRPPTDPDKPACPYQTGFTIDIKSHTPPAPFGGRDYGPGTRVVVPDQALRSLKQTELVMGNPPLRTADPAAPRTHTLSVTHELAVADGRGAQLVLCTITPKVPAGQAAFQAVAKIYDPLYYSFPNKDVPSVPCDVTWLADEDYSREAAAYEHLQSIGKAGSFAPRYFGSWTFTARILIDKTTPRSRPVRLILLEYVRGPSIRELCPAPPAAATFDEAYRLEVLARVLDGDAKLRFKGINQRDLAARNVLLNYPPGLPPAERHTMIPRLVLIDYNISIVYARTKRKIGPYHGTTLPPNPMQIHWTNPLQEFRGWIPAEWEAAPRLRQEWLSKRFGGKNMASYAPITAKLEFAK

SEQ ID NO: 4454 - DNA, 1170 bp, Myceliophthora thermophilia
atgcaggacgcaggtgcgctgccgcaggacaggcattccccgatggcgtcaaagcagaagaaaccctacgatatcagcaacctaatgtcgcctcccgagcccgcacccctggacatgtacaggtcaacgagctcgacgaccgggaaaccttcctcgcccaccgacgaggcccgggtgtctcatcaacctctgtctccgcccgtttcccccttctcccaggcggccaatacagttaacgcggcaccgcccctgagtctcggcggcaaagatccgattctctaccccgccggcggcgaaccctcctcgagctccccgaccggtcccttgttcacacctaccgcgggttcggtcgagaatctaaaggcgactacggagcggttggtcaacgcgcacatcgcatccaggcccgccggttacttccgggactcgacgccaccgaggccagaggactacgagctggccctctacttcaagtccaactgcttccgcatgttccaggacaacccgaaggaatggctgcgcaaggagcgcgagctcctcagggccgaccgaaaacatacggcgcactcgtaccagcccagcaaactgccgcacatcttgcccgcctcgaagcctgcagtcctaggcccgcagacgaccaaggccccagccgtgcgcgttcagaagccaagatccccgaagacgaagccacagcaaccgcggccgattcgggcaaccccggcgccggtgcgcgagacgatccgcgtcggcacgccggagccccgagttcggacagttgcgcccaaccgcgaggataaggattttgcggcgctggaggatctctctccgcccctcagctcgctcccctcgaagccaaacagcctcaaggtcgattggaagggcaacgcgctggacctgagcaacgacccgcaccggcatctcctgcaccccgacgagctgatcctggccagcaatctccggctcgactgcgcgacctacctcaccagcaagcggcgcatctttctgcggcggctcgagtgcgccaagatcggcaaggagttccgcaagacggacgcgcagcaggcgtgcaagatcgacgtcaacaaggcgtcgaaattgtggcaggcctacgagcgcgtgggatggttggacattgagtggatgcgcaagtacctggaccgaaagccgtaa

SEQ ID NO: 4455 - protein, 389 aa, Myceliophthora thermophilia
MQDAGALPQDRHSPMASKQKKPYDISNLMSPPEPAPLDMYRSTSSTTGKPSSPTDEARVSHQPLSPPVSPFSQAANTVNAAPPLSLGGKDPILYPAGGEPSSSSPTGPLFTPTAGSVENLKATTERLVNAHIASRPAGYFRDSTPPRPEDYELALYFKSNCFRMFQDNPKEWLRKERELLRADRKHTAHSYQPSKLPHILPASKPAVLGPQTTKAPAVRVQKPRSPKTKPQQPRPIRATPAPVRETIRVGTPEPRVRTVAPNREDKDFAALEDLSPPLSSLPSKPNSLKVDWKGNALDLSNDPHRHLLHPDELILASNLRLDCATYLTSKRRIFLRRLECAKIGKEFRKTDAQQACKIDVNKASKLWQAYERVGWLDIEWMRKYLDRKP

SEQ ID NO: 4456 - DNA, 2445 bp, Myceliophthora thermophilia
atgatgagggcacaccttgaacagaggcagcagcggcagcacttcgaacgtggtgctgccggcatcagcggctctgccttccccccgctacagaaccgggctggcgaaagcgatagcccttatgtccgccgccacgccgatacccccgtagcatggcaggtgttcgatgcagagaccctcgccagggcgacggccgaaaacaagccgatcttcatgcacatcggcttccaagcagaccacttctgccacctgacaacccaagactccttctccaacccatccgtcgctgcccttctcaacaactccttcattcccattctcgtcgaccgcgaggagcgcccggacctcgatacgatctaccagaactatagcgaggccgtcaacgcgacaggcggctggccgctcaacctcttcctcactccggatctgtatcccatctttggcggcacctattggcccggcccgggaaccgaacacagcagcgccgcggcatcggcggcaggtggtggtggtggcggcggcggcgggggcagcgggacgggggccatctcccgcggctcggcgggcgaggagtcgtacagcgacttcctgggcatcgccaagaagatacacaagttctgggtggagcaagaggagcggtgccggcgagaggcattcgagatgctgcacaagctacaggacttcgcgcaggaggggacctttggcgccggcgccacgctcccggtttctgcgacccccgtggcgagcgccggcgcgggtccggccccggtgagcgtggaccccggggatctggatctagaccagctcgacgaggcgctcgccaggatcaccaagatgtttgacccggtagactacggcttcgggacgcccaagttccccaacccggcccggctgtccttcctgctgcgcctggcccaatttccgggggaggtacgtgatgtcatcggggacgaggaggtcgagaacgcggtcaggatggcgctgggcacgctgcggcgcatccgggacggcgcgctgcgcgaccacgtcggcgccggctttatgcggttcagtgtcacgagcaactggagcatgccgcactttgaaaagatggtcggagagaacgcgctgctgttgggcgtttttctcgacgcctggctagggcttccacgggacgctggcaaggggccggcgctggacgacgagttcgccgacgtggtccttgaactcgccgactacctcacgagccctattgtgcgcgtggccgaaggcggcttcgtgtcgagcgaggcggcagattccttctaccgcaaaggcgaccggcatatgcgagaaggagcgttctacacctggacgcgcagggaattcgaccaggtggttggtggcggatccagcgacgaccacgcgagcacagttgctgcggcgtactgggacgtgcaggaggacggaaacgtggcgcaagagcaggacccgttcgacgagttcatcaaccagaatatcctctcggttaaggcgagtgccgccgagctgtcgaagcagctcggcatccccccatccgagatcaaacatcttgtctcggttgcgcgcgagaagcttcgtgcgcaccgggaaaaggagcgtccccgtccaccgagggacgagaagatcgtcgtgagcaccaacgggatggtcatctcggcgttgtcgaggacagcggctgctcttcggtcgcttgaaggcgaaagagcggacaggtatctccaggccgcgagagatgcggccgccttcatcaaggagaacttgtgggatggagccaacagcaaaggtaacccactacatcggttcttctgggagagaccaagtcaagtgctcgctttcgcagatgactacgcctttctgatcgacggtcttcttgatctctacaacgcgaccctggagcaggagtgggttgactgggcaagacaactgcaaggtcccgtttccaccgacaccgctccctctccgcgacacgcccattcaggcggcttctactctaccgagtcggagaccctcagcccaacgatcctccgccttaagagcggtatggacaagtctcagccctcgaccaacgccgtgtcggcgtcgaacctgttccggctgggcacgctgctgggggtggatgcctacctcatacaggcgcgggagacggtcaacgccttcgaggccgagatcctgcagtacccgtggctgtttgtcagcctgctgaccggggtcgtcacggcgcggctgggcgtgaagagggtggagctgaggaagggggacgaggagggtctgcagaggtggtacaccacgccaagggccgaggccgccgtcttgatcctggtcggggacgaggagtccaaggagaccactgcgaaggggcaaggacagagctgttcgtcagaagcggggctcgaggagagggtgaaagggttggcgattggggatcgatcgggtcgtgaggagtga

SEQ ID NO: 4457 - protein, 814 aa, Myceliophthora thermophilia
MMRAHLEQRQQRQHFERGAAGISGSAFPPLQNRAGESDSPYVRRHADTPVAWQVFDAETLARATAENKPIFMHIGFQADHFCHLTTQDSFSNPSVAALLNNSFIPILVDREERPDLDTIYQNYSEAVNATGGWPLNLFLTPDLYPIFGGTYWPGPGTEHSSAAASAAGGGGGGGGGGSGTGAISRGSAGEESYSDFLGIAKKIHKFWVEQEERCRREAFEMLHKLQDFAQEGTFGAGATLPVSATPVASAGAGPAPVSVDPGDLDLDQLDEALARITKMFDPVDYGFGTPKFPNPARLSFLLRLAQFPGEVRDVIGDEEVENAVRMALGTLRRIRDGALRDHVGAGFMRFSVTSNWSMPHFEKMVGENALLLGVFLDAWLGLPRDAGKGPALDDEFADVVLELADYLTSPIVRVAEGGFVSSEAADSFYRKGDRHMREGAFYTWTRREFDQVVGGGSSDDHASTVAAAYWDVQEDGNVAQEQDPFDEFINQNILSVKASAAELSKQLGIPPSEIKHLVSVAREKLRAHREKERPRPPRDEKIVVSTNGMVISALSRTAAALRSLEGERADRYLQAARDAAAFIKENLWDGANSKGNPLHRFFWERPSQVLAFADDYAFLIDGLLDLYNATLEQEWVDWARQLQGPVSTDTAPSPRHAHSGGFYSTESETLSPTILRLKSGMDKSQPSTNAVSASNLFRLGTLLGVDAYLIQARETVNAFEAEILQYPWLFVSLLTGVVTARLGVKRVELRKGDEEGLQRWYTTPRAEAAVLILVGDEESKETTAKGQGQSCSSEAGLEERVKGLAIGDRSGREE

SEQ ID NO: 4458 - DNA, 1929 bp, Myceliophthora thermophilia
atggcccccgcagtgggaaagtcctatgtggggtcgccagcgggcaacatgcccgtcaccgacgccttctcattcgcctttagccaaccctttcagagagccagcgattttgtgccccgcgaacacgcgctgccgccgatcgaagagcagcggcccatctttgtcgacaacaagtcggaccgcgcgctcaccttcggccagatctcgcaggatgcgctcgccgtggccgccgggctgcggcgcctgggcctcgacccgaacgatatcgtcaagctgccgccgacgccgtcatgccccgcgggccccgagattgcccccgtcgtgctgatccagttgcccaactgcctgcctttcgctccgatcctgttcggcaccctcgcgtcgggcatgacggccaccctcgtctcgcccgccctgaccgccgctgagatcgcatggatcctgcagaacgcccgcccgcgcgccatcatcaccgccaccgcctgcctcgctgccatgaaagaggccctctccaaacaggccgaagcctccttcttctccaccgttcccatcttcaccgtcgacaccgccgctgacacctaccccgaagcacgaccagcgccgccgccgccctccgactggcgcgccctcccctccccgaaacccccttcggtctatttctattccccaaccttcccagcctccagcgccccggcccgcaccgccgtgatcctctggtcctcgggcacatcaggccgctccaagggcgtgctgctctcgcaccacgccctcaacttctctctggcctcgctctggcacgacgccgactactacggcgcccggccgcagcggcaggtctggctcggctacgtgcccttctatcacgtctttgggctgtgcaacgtcttcttactggccgtcgccgcgggtgccacggtgtacacgatgccgagcttccacctcgagacggtgctgcgcgccatccgcgaccgcggcgtcacgtacctgcacatggcgccgcccgtcgccgtcatgctggccaaggcggccatcgtcgagccctacgcccgcggcggcggcttccgcaccgtcgtcgccggcgtcacgggcggcgccccgctcgggcacgaggtcgtcgaggaggtctaccggcggtgcggcttccgcgtccggctgggctacggcctgagcgagacgtgcagcaccgcgctgcagcggggcgtcggcgagcgcgagatgcgcgagcaggccggcgacacggggcggccccactggggggtcgaggtgctcattgctggcagcggcgagggtgcgtacgcgaggcggccgggcgagaagacggccgccgccccggtggacgtggagggggaggtgctggtgcgggcgcccgggctgctgtcggcgtacctgcccgtcggcgtcttctcctcctccggcgggacggccaagccggacatgtcggcgacggaggacgccctgacggccgacgggtggttccggacaggcgacgtgggcgcgctcggtccccacggccggctgcgcatcacggaccggctcaaggagcttatcaaggtgcgcgcgtaccaggtggcgccggccgagctcgaggcggtgctgtgcagcagcggggccgtcgccgacgccggcgtcatcggcgtctacgacgagagcgaggcgaccgagtggccgcgcgccttcgtggtgccccgcgccggccgcgagaacatgtcgcgtgccgacctggagaagctggctggcgagctcaaggtgctagtcgagaagcggacagcaaagtacaagtggcttgtcggcggcatcgtctttgtcgaccaaattcccaagagcccgagcggcaagatcctgaggcgggtgctgaagaacggcggacccgagaccaagggggtcgaggtgaagctgtacgagaagaagaagcgggattccaagctgtaa

SEQ ID NO: 4459 - protein, 642 aa, Myceliophthora thermophilia
MAPAVGKSYVGSPAGNMPVTDAFSFAFSQPFQRASDFVPREHALPPIEEQRPIFVDNKSDRALTFGQISQDALAVAAGLRRLGLDPNDIVKLPPTPSCPAGPEIAPVVLIQLPNCLPFAPILFGTLASGMTATLVSPALTAAEIAWILQNARPRAIITATACLAAMKEALSKQAEASFFSTVPIFTVDTAADTYPEARPAPPPPSDWRALPSPKPPSVYFYSPTFPASSAPARTAVILWSSGTSGRSKGVLLSHHALNFSLASLWHDADYYGARPQRQVWLGYVPFYHVFGLCNVFLLAVAAGATVYTMPSFHLETVLRAIRDRGVTYLHMAPPVAVMLAKAAIVEPYARGGGFRTVVAGVTGGAPLGHEVVEEVYRRCGFRVRLGYGLSETCSTALQRGVGEREMREQAGDTGRPHWGVEVLIAGSGEGAYARRPGEKTAAAPVDVEGEVLVRAPGLLSAYLPVGVFSSSGGTAKPDMSATEDALTADGWFRTGDVGALGPHGRLRITDRLKELIKVRAYQVAPAELEAVLCSSGAVADAGVIGVYDESEATEWPRAFVVPRAGRENMSRADLEKLAGELKVLVEKRTAKYKWLVGGIVFVDQIPKSPSGKILRRVLKNGGPETKGVEVKLYEKKKRDSKL

SEQ ID NO: 4460 - DNA, 153 bp, Myceliophthora thermophilia
atgttcggaggcttccaacccccccaagcctcgcccgaggagattcgcgccgctgaggccgaggccaccttcaccctgcagcgtgtcctcgcgaccgctgccgccctttacctctctcccttcgttatcgacgccgtctccaagatgttctaa

SEQ ID NO: 4461 - protein, 50 aa, Myceliophthora thermophilia
MFGGFQPPQASPEEIRAAEAEATFTLQRVLATAAALYLSPFVIDAVSKMF

SEQ ID NO: 4462 - DNA, 981 bp, Myceliophthora thermophilia
atggccgctgctgtcgctgttcccctgtccaccatcaacagcgagctcggcggcgtgctaccccccagcgccgtcgtgcagcactcgcctcgccatggccggagccgagcgatgagcatgaagggcaagggcggccggcagcgcggctacagcgtggtggaggaccgggacgtgactatcgccaaggctctcatgtttgtggtcaagcgggccatccagaaggaagacgtcgaggaaggggatgagggggagtacctcgtggccgaccccgagggctgggtcagcgtcgccgatgtgctcgcgcactctcggctctccgccctgggggccacctttgacgacatccgaagggtcatcgccaacgcgcccaagccgcggttcgacctgcgcaaggcttccaacgccgatgccgaacccgaagagccggccgcctggcaagtctctcgcatcacccacaaggaaaccaccgcgtctccagtgccggttggggacaagctcacggccgactcgccggacctgcccgagtttgtcatctacgagacctcgtatcagaggtaccccctcctcctggcgctgggtgccatcaccagggctccaggcggcagcgaataccgcgctttcgtgcccgtaacggtggacgaagagggcaacgagtcgcgccagcacgccggcgccggggatgctgccgagatcagcatctggattcacctgcgcacggctctgcaggcggagccgtccatcgcgtggaggcgcagcgagagcggcgccatcgtcacggttgacgacgtcccaaagagcctctggaacaaggccatcgcccggcggcccgagattggcatcctgttcgaggacggcgaggtccgcaaagaggtccccgccaatcttcgcgggaaaggagccaagggcaagactcgcaagggcaagggcgccctgaagcaagagggcagcggtgatgactcaggcagcgccagcgaggagtag

SEQ ID NO: 4463 - protein, 326 aa, Myceliophthora thermophilia
MAAAVAVPLSTINSELGGVLPPSAVVQHSPRHGRSRAMSMKGKGGRQRGYSVVEDRDVTIAKALMFVVKRAIQKEDVEEGDEGEYLVADPEGWVSVADVLAHSRLSALGATFDDIRRVIANAPKPRFDLRKASNADAEPEEPAAWQVSRITHKETTASPVPVGDKLTADSPDLPEFVIYETSYQRYPLLLALGAITRAPGGSEYRAFVPVTVDEEGNESRQHAGAGDAAEISIWIHLRTALQAEPSIAWRRSESGAIVTVDDVPKSLWNKAIARRPEIGILFEDGEVRKEVPANLRGKGAKGKTRKGKGALKQEGSGDDSGSASEE

SEQ ID NO: 4464 - DNA, 846 bp, Myceliophthora thermophilia
atgtctgaaacaaagaccatgtcggaagaagtcaaggaggtgacggtcaccaaagccgacctcaagagcaaggactttgtgccgcgaggcaacaagtcgtcctcgcctttcaacacgtcgctgtaccttggcctgagagcggtcgactgctgctggcagtacctggtcctctcccagggctacggctcatatgtcatccgcctgctccggggcgccgtcattccgaccgccgcggcggccgagacgggcgtcggactcatcgacgacctcggcctctcgggcttccgactggtcctgctcctgatgaacgtcctggccgccgccaagcacttctggttcgtcctgcgcgtcgccgaggaggcctggaccctgccgggcgccatcatcgtgggcctcgacaacatcttcttcgacacgctcaacaacttcctcttcctctgcgccgccacctcggccacctcgcacccgtccggcgagacgctgtcgaacccctatctgctggccggcttctccctcttcgtcctcggcatcggcctcgagtgcgcctgcgagatcgaccgcaagcgcttcaagacggacaagagaaacaagggcaagccgtacaccggcggcctcttcgccgtcgtccgccaccccaactatgccgccttcaccatctggcgggccggcctcgccgtggccacgagcggcatcacggccggcctgctcatcgccaccttctttacctgggacttttcgaaccgcgctgtcccggcgctggacgaatactgttcgaagcgatacgggcaaatgtgggccgattacaagaagaagacccgcttcaccctgattccgtatgtgctttaa

SEQ ID NO: 4465 - protein, 281 aa, Myceliophthora thermophilia
MSETKTMSEEVKEVTVTKADLKSKDFVPRGNKSSSPFNTSLYLGLRAVDCCWQYLVLSQGYGSYVIRLLRGAVIPTAAAAETGVGLIDDLGLSGFRLVLLLMNVLAAAKHFWFVLRVAEEAWTLPGAIIVGLDNIFFDTLNNFLFLCAATSATSHPSGETLSNPYLLAGFSLFVLGIGLECACEIDRKRFKTDKRNKGKPYTGGLFAVVRHPNYAAFTIWRAGLAVATSGITAGLLIATFFTWDFSNRAVPALDEYCSKRYGQMWADYKKKTRFTLIPYVL

SEQ ID NO: 4466 - DNA, 477 bp, Myceliophthora thermophilia
atgcggcgctgctggccacccgcgaccgaatatacggccggccgtggcctgcaggtggcgccgggggaagtctgcaacatcactaacgcggtggaagtgttgctcgccaccctggtctgccaccgtgatgtcctgcctcctccaacaggacgtggccatcgccggcaggcgcagcagtataggcgcgctgcgggtatactcggcgtcggctgggcgttcacatcctaccgcgacggcgtgatcaccggcaaggaggaggtgccatcgtaccggcctgacgaacgaggggtacacgccattaagcgagctgctggtcaactccgggcgacgctgctagagaggaggatatatatgaggcgctgtccggtaggatcggcatccgacaagtacttcgtctggcggcccgggctagagcgcaattcaaatctcttcatcgttcgccctgcccgggagccggaagatatcacgtattcgtaa

SEQ ID NO: 4467 - protein, 158 aa, Myceliophthora thermophilia
MRRCWPPATEYTAGRGLQVAPGEVCNITNAVEVLLATLVCHRDVLPPPTGRGHRRQAQQYRRAAGILGVGWAFTSYRDGVITGKEEVPSYRPDERGVHAIKRAAGQLRATLLERRIYMRRCPVGSASDKYFVWRPGLERNSNLFIVRPAREPEDITYS

SEQ ID NO: 4468 - DNA, 2448 bp, Myceliophthora thermophilia
atggcattcgacgacacagccgacactgacgaagtgcattccgccctgtccctcatcgaaagtgcgggactgccacatcctctggactcgctgctgtcatgctttgtcaaagacgctgtggaccctctcgtggcagcacgctacgtgcatcgcggcaccgcagccgatggtgccccggccctcgtagcagactggacatacatcatcgagtccaatgccgctgctcagcagagcatattcaagcgcgacgccaacaggtgttgcgtgactgggaaagccgcccgtctctgggatcctctggttgtggcccccatccttcccgtgccttctggctggagcacagacaagccgcgcatctttgacatgctgggcgctttctttggccctccctatcgtgactggtggctttcctacgcccagaatcccgagttcacatcgccttactccaatcactggctggtccggaggtcggcacaccgtgcttggtcgcgtggccttgtttgcctgaagagactacagtcatcaatggtggagttccaagttgaacatccccttgtcaggccagaagaacccctcgagatcgagggttcctatccgctcttgggcgaccactcacggtcgggaatcgagaaggtagaccctcgctttgtcagcactcacgccaggctcgcccggagcatcaggtttgtcgagatagccaagtcactgggggtccgaccatctgagccatcatccaaaccgcggccacgtcgtccagcaccagaaccagaaaccaaccgcaagaccaaatccctctctcccctgaacctcgcaaccagcgtcttgctctccacctggctcatgtttccctcccgcctccgcgtagccgtctacgacctcctccgcaaggtcggcgcgctcctctacgcccagcccgaccacgccaccgtccaccggctgcccttcggcctctacctcaaacgccaaaccgacccggccggctcccgcaacaaattcgccgccctccagctcctccgccggcacaccaccgtccccgtccccagacccctcgacgtcgcccacaagcccgccagccgcgccgaccccttctccgtcgcggagacctacctcatgaccacccgcgtcccgggcgtcccgctctaccgctgccagcacgtgctctcggacgccgacctggcggacctcgcgcgccagctggccgcgcacctcgcccagctgcgcgccgtgccccggcccattcgcaggatcaagccgtttccggacgcggtcatctgcaacacgctgggcgaggccgtccgggacccgcgcatccgcggcggcgagccggtcggccccttcgcggacgaggccgccttcagccgggagctgatgttcccggaggatccggcacggcggggccaccgcgtggtgtttacgcacgcggatctgaatccgcggaatatcctcgtcgagaggaggagtgctggtgggcatgggcaggggggatgggtggtgagcgggattgtggactgggagaattccgggttttaccccgactattgggactgtaccaaggcttttttcgaggggtttcgttggtcgaggaggtataatgacatggtgagggcggtgtttgcggcgttgggggactacgagaaggagttggaggaaagactggccgctctgcagatcgaaaacaaggatctccgtgcagaacgcaatcgcatggtctccgagcatgatcggatcctctctgagcagtcggcctctctggagcagacaactagagagctgaggaccgcaaaacaggagctctctcgcgcccttgccgagcagctgaagctcagcaaggataaggaccgtgagctgcaagacaaggaccgtgaactacaagacacagaccgtgagctgcaggagaagtcgcgcgagctgcaagagaaggaccgtgacctgcaattcctgaaaacccacaacgaggcacccccggaaagggagctcagcttggaggatgcggtcaatcaacgggatgccgatctccgagaggcaagggaggaaaaagaacgcgagctggcagtgctcgctcaggagaaggatgacaagcttcgacagaatgataagctgcgtaacgccgaggaagagaaggagcgtgagctcgcattgcggttccagacgatggacgagctccgggaagcagagaattacaagagagagctggaagcttctgtcgacaacagagatgccgaaatccttggggtaagggtggagaatgccaggctcaaggctgctttggaagcagcggaggcgagagccgtcccaccgcagcaatctgatcacagcgtggctgcaagcacagcagctggtcaccggccggcccaggggcaggatcgcaggcaccgcgaagtggaagcatctgggtcttgggtccgtcgcgtgcaagagtggctgaagaggctggggcctcggttttga

SEQ ID NO: 4469 - protein, 815 aa, Myceliophthora thermophilia
MAFDDTADTDEVHSALSLIESAGLPHPLDSLLSCFVKDAVDPLVAARYVHRGTAADGAPALVADWTYIIESNAAAQQSIFKRDANRCCVTGKAARLWDPLVVAPILPVPSGWSTDKPRIFDMLGAFFGPPYRDWWLSYAQNPEFTSPYSNHWLVRRSAHRAWSRGLVCLKRLQSSMVEFQVEHPLVRPEEPLEIEGSYPLLGDHSRSGIEKVDPRFVSTHARLARSIRFVEIAKSLGVRPSEPSSKPRPRRPAPEPETNRKTKSLSPLNLATSVLLSTWLMFPSRLRVAVYDLLRKVGALLYAQPDHATVHRLPFGLYLKRQTDPAGSRNKFAALQLLRRHTTVPVPRPLDVAHKPASRADPFSVAETYLMTTRVPGVPLYRCQHVLSDADLADLARQLAAHLAQLRAVPRPIRRIKPFPDAVICNTLGEAVRDPRIRGGEPVGPFADEAAFSRELMFPEDPARRGHRVVFTHADLNPRNILVERRSAGGHGQGGWVVSGIVDWENSGFYPDYWDCTKAFFEGFRWSRRYNDMVRAVFAALGDYEKELEERLAALQIENKDLRAERNRMVSEHDRILSEQSASLEQTTRELRTAKQELSRALAEQLKLSKDKDRELQDKDRELQDTDRELQEKSRELQEKDRDLQFLKTHNEAPPERELSLEDAVNQRDADLREAREEKERELAVLAQEKDDKLRQNDKLRNAEEEKERELALRFQTMDELREAENYKRELEASVDNRDAEILGVRVENARLKAALEAAEARAVPPQQSDHSVAASTAAGHRPAQGQDRRHREVEASGSWVRRVQEWLKRLGPRF

SEQ ID NO: 4470 - DNA, 1218 bp, Myceliophthora thermophilia
atggaaccttcaaaagtcgaagccatcaagaattggctacgaccgacgtcagtcacggaagtacgaagtttcatcggatttacgaacttctactggatgttcatcaggaacttcggagcgatcgcacgacctttgcacgaacttactaggaagggcgctgagttccaatgggaagagcgatatgagcaagcattcgcgcagattcgcgacgccatcaccgaggatccagtactggtattgctagaccccaagaagccatttgagaagctcgatagactacgtcttaattatccgatctacgacaaggaactacttgcgattgtcgaagctttcaaggaatggcgactatacctcagcggcacgattgaaccagtacaagtgtacacggatcacaagaatctgcggtacttcacgacgacgaaggagctcaatagacgacaaatacgatgggcagaattccttgtggaattcaattttgagatctgctacaagaagggcaaagagaacacacaagcggatatcttaagccgacgaacggatcacacggaaggacgaacggaaacaacactaccgttgttcaaggaacgaacagacggaacgctgtatcacgaaacgcagacacccgtggaagatgatctactcgactcgttcctagaatgttgcgcaatctttcgagaagaaaggatcaacgaggcacagtatcaagcaacacccggaccagcggtacctgacgaagtgaaagaaaaagatgggaaactctggtaccgaggcaaagcatacatctacgacaaagatcaacagctacaaatgattcgagaactctacgagtcgaaactcggaggatataaaggagttacgaagactgtcgtacaagtcaagaaacactacgactttctacagttgacgacacgagtcaaggaagtcgtacggaactgcgacatctgcaatcgaagcaagacggcacgatacaagccgtatgggctacttcagccactaccaacagctgacaaaccatggagttcagtcacgatggactttatcacgaagctgctagaatccaaggacacagccataggagtgacctacgatagtattcttactgtagtagatcgcctgaccaaatgggtatatttcttcccctacaaggagtcctggacagcggaacagctggcagacgtgatttatcggcaagtcgcatcagtgcacgcttggccatag

SEQ ID NO: 4471 - protein, 405 aa, Myceliophthora thermophilia
MEPSKVEAIKNWLRPTSVTEVRSFIGFTNFYWMFIRNFGAIARPLHELTRKGAEFQWEERYEQAFAQIRDAITEDPVLVLLDPKKPFEKLDRLRLNYPIYDKELLAIVEAFKEWRLYLSGTIEPVQVYTDHKNLRYFTTTKELNRRQIRWAEFLVEFNFEICYKKGKENTQADILSRRTDHTEGRTETTLPLFKERTDGTLYHETQTPVEDDLLDSFLECCAIFREERINEAQYQATPGPAVPDEVKEKDGKLWYRGKAYIYDKDQQLQMIRELYESKLGGYKGVTKTVVQVKKHYDFLQLTTRVKEVVRNCDICNRSKTARYKPYGLLQPLPTADKPWSSVTMDFITKLLESKDTAIGVTYDSILTVVDRLTKWVYFFPYKESWTAEQLADVIYRQVASVHAWP

SEQ ID NO: 4472 - DNA, 1332 bp, Myceliophthora thermophilia
atggagaggtttggcctccgggcagatgatctccaatggtcctcaataccaaccgaactgctcctcgcggagctgtcgagacgcagtgatgccgacgaacgaccagcatgcggctccgggaagaaggggtactatgacacgggcatccacgtgtttgccctcttcctgattcttaccctgagcactctgtcgtgcgggttccccctcttttcccagcgcctgaccaagggcagcaaacgccagcgcaacatcatcttcctctgccagcacttcggcaccggcgtcctgatggccaccgcctttgtccacctcctcccgacagcgtttacctcgttgaccgacccatgcctcccgcacatcttcagcgaaggataccggccgctcgccgggttgattgccatggtgtctgcgttcgtggtggttgcgctcgagtcgtacttgacaacgcggggcgcgggacattcccattcgcatcacgcctgggaagaggaggaggacagcgacgacggcgacacggctggcaatgaacacgggcacgccggcgagtccgcttcgcggcacccccggcgcgacctgccggcaaacattgcgctcgacgacctggaggcgacagagggcttggtcgcgggcgcgtcgcctcttccgggatccacgcccacgatggcacctcgtcgggacaacccgctcaagagccagcgagatagcacgcaggggaacgaccgcgagtcgctggacctggatctcggtttcgaggagctgcgccagagcccggaaccgagccagcaacgcaagtccgaccccaggctcccgcccctccagcgcgtccccaaccccgacgagcagaagcgcatgatgctgcagtgcgctctgctcgaggccggcatcctctttcatagcgtcttcatcggcatggcgttgtcagtcgccaccggcccgacctttgccgtcttcctcatcgccatctctttccaccaatgcttcgaaggcctcgccctcggcacgcgcatcgccgccctgcacttcccgcgctcctcgccgcgcccgtggctgatggtcctcgccttcggcgccacgacgcccgtcggccaggccatcggcctgttcgtgcacagcttctacgacccaatgagccagaccggcctgctgatggtggggttcatgaacgccatctcgagcggcctgttgttgtttgccggcctggtccagctgctggccgaggactttctgagcgagaagagctacaaggtgctgaaagggaggaggagggtgaacgccttccttgccgtcgtcagcggcgctgggctgatggctgttgtcggggcctttgcctga

SEQ ID NO: 4473 - protein, 443 aa, Myceliophthora thermophilia
MERFGLRADDLQWSSIPTELLLAELSRRSDADERPACGSGKKGYYDTGIHVFALFLILTLSTLSCGFPLFSQRLTKGSKRQRNIIFLCQHFGTGVLMATAFVHLLPTAFTSLTDPCLPHIFSEGYRPLAGLIAMVSAFVVVALESYLTTRGAGHSHSHHAWEEEEDSDDGDTAGNEHGHAGESASRHPRRDLPANIALDDLEATEGLVAGASPLPGSTPTMAPRRDNPLKSQRDSTQGNDRESLDLDLGFEELRQSPEPSQQRKSDPRLPPLQRVPNPDEQKRMMLQCALLEAGILFHSVFIGMALSVATGPTFAVFLIAISFHQCFEGLALGTRIAALHFPRSSPRPWLMVLAFGATTPVGQAIGLFVHSFYDPMSQTGLLMVGFMNAISSGLLLFAGLVQLLAEDFLSEKSYKVLKGRRRVNAFLAVVSGAGLMAVVGAFA

SEQ ID NO: 4474 - DNA, 1047 bp, Myceliophthora thermophilia
atgtctgtagatatctggccacgtattgcgccagatgcgcttaaaactgcggtcgagacgaccgagaagcgcgaactcgactggcttgtcgaggagctgcgcgaaattcttaccaacctcaagcatggccttgaagactgctatgccctccttgcgccgatagacccggggagcacgcttgtgctcagcacaccaagaaatgagattacaatccatctccgcatgcgtaccctcccttaccaaacgctcaccatcaacccggaacatcctatacacctcacccccctgacaaatctgcactccatcctcacacattcaatcgacctcctcaagctcactctctcctactcctatcccaccgcgacggcgacgactccgctcccgtccgacctaccaccaccaccgaacttcctctccgcccagctccgtctcctgtcccaatccctctcggaagcgctcgcccttctcaagggacccccactcacaaccgccgacaccacctggacgacccggtccgtggccccatcccacttctccccgccgctcccgccgatcgtcggcgggaccgcgtccggcttctcttccggctccagcccgtccctcagcttttacctaaccgtccaggacagcttgctcgtcctctggctccgcgcgatcgagccggccgacgcgcccgtcaacttcggcaccaagctcgccctggcgatcggcaccgcacgccggctcgagcatgacgagatggacaaagtatttggatactgctgtggcggggaagaccatgcgccgcccgctgcggggggtcctggtccgggcggcggcggcggtacaggacccgcggggagccccggtgcccaaccgatccccctgtcaggcacgcgtgagaagaaaccggtggacgtgttcgtgcgcgagaaggtgcgcgtggagagcgcggatccgagtctgctgtcgctctcggccaagctgagcgcgctcagtcatacgctggccctagcgaggcggaacttcgctgctgtgctgggcgaggagttggagggggaggattag

SEQ ID NO: 4475 - protein, 348 aa, Myceliophthora thermophilia
MSVDIWPRIAPDALKTAVETTEKRELDWLVEELREILTNLKHGLEDCYALLAPIDPGSTLVLSTPRNEITIHLRMRTLPYQTLTINPEHPIHLTPLTNLHSILTHSIDLLKLTLSYSYPTATATTPLPSDLPPPPNFLSAQLRLLSQSLSEALALLKGPPLTTADTTWTTRSVAPSHFSPPLPPIVGGTASGFSSGSSPSLSFYLTVQDSLLVLWLRAIEPADAPVNFGTKLALAIGTARRLEHDEMDKVFGYCCGGEDHAPPAAGGPGPGGGGGTGPAGSPGAQPIPLSGTREKKPVDVFVREKVRVESADPSLLSLSAKLSALSHTLALARRNFAAVLGEELEGED

SEQ ID NO: 4476 - DNA, 672 bp, Myceliophthora thermophilia
atgacgaagcaggatctggacgataggaaaaagtcagacggcttggcaagcctgatcgtccgctccgcccagcatctcacggttacgacgattgagctcacaaccgtctcttttgtcgtcattctctttggcaccgcgtggtgctggaaagacaagccatccgacgtccagacaaccatccccatcaagtcaaccatccacatcgacgagatcgtcgcgagcgtttcgccctttaccagacgcgtctgcacgaagccctgggaccgcgttcccggtgacatgttcctgctgatggacttcgaccttcagatcgccctcgcctggcgtgcagcaagcttatacatgatcatctttggcatctctgggtgtctgtggatgggcatgtgggtgtgggtaaacttcccgcgtattcggcatgccgagggtcccgagttgagtctcttcgcacgatcactcgaggtcaagttcctagatctgcatcgagcgccgtaccgggaccccagcctaccccggttcgggcaggcgagcgcgaaacgcccgacttggacccgcaacctgctcgacgtgctcgacgggagggtatatcccgatcgagtatcttgttgggttgagtcccttccatcggacgcctacctcacggtcgagtggctgtcatttctccctcacggctag

SEQ ID NO: 4477 - protein, 223 aa, Myceliophthora thermophilia
MTKQDLDDRKKSDGLASLIVRSAQHLTVTTIELTTVSFVVILFGTAWCWKDKPSDVQTTIPIKSTIHIDEIVASVSPFTRRVCTKPWDRVPGDMFLLMDFDLQIALAWRAASLYMIIFGISGCLWMGMWVWVNFPRIRHAEGPELSLFARSLEVKFLDLHRAPYRDPSLPRFGQASAKRPTWTRNLLDVLDGRVYPDRVSCWVESLPSDAYLTVEWLSFLPHG

SEQ ID NO: 4478 - DNA, 633 bp, Myceliophthora thermophilia
atggacaacacgccggatcaaacaacgctggccaccatctcattgctcgaggggcgtctacggcggatcgagcacatcctctatggcccaacgacgcccccaacccagcccccgcagcagtcggcggtagcttccctcgtcgatctcgaacaccgcttcaaccaactgatccgccacttccgcgtctacgccgacatcctcaagatttacaaatcacacccgtcgctcttccaacccccgtcgacagcaagaggactaacaaccacgacatcgaccgggcagcctgaccccccgctcccgccgactcaactctcgccggaagccgtgcgcgccacggtcctctccctccgccctgacggccgcgacgaccgacacgccgatccggacgcgaagcagagcgcggcgctggcggcgctgacgccccggctgcgcgccgtcgaggcgctgcagcgcgcccaggaggccgagatggcggagctgcgggcgcgcagcgagaaggcggtccgcgcgtggtacgagggcggcgtgctgcggtgcggggccaggctggcggacgccgagggccggctggagaaggtcgagcgcggggtgcggagggcagagagggcgcgggccgagcgggataaggtctga

SEQ ID NO: 4479 - protein, 210 aa, Myceliophthora thermophilia
MDNTPDQTTLATISLLEGRLRRIEHILYGPTTPPTQPPQQSAVASLVDLEHRFNQLIRHFRVYADILKIYKSHPSLFQPPSTARGLTTTTSTGQPDPPLPPTQLSPEAVRATVLSLRPDGRDDRHADPDAKQSAALAALTPRLRAVEALQRAQEAEMAELRARSEKAVRAWYEGGVLRCGARLADAEGRLEKVERGVRRAERARAERDKV

SEQ ID NO: 4480 - DNA, 732 bp, Myceliophthora thermophilia
atgaagattacgacccggacattagctagaagaatggtggctacctgcgaccccgaacggagtcgtattcgactagcgagatggggagcgcgcaaggatcgcgagcggacgatgctcaggggaaggcatatcctacggatctaccgtaagagatggatagtgatcaaagaaggcgacgagtggaaaacggcctttaggataccctatggccactatgagtacctcgtcatgccatttggacttacgaacgcgccggcaacgttccaagccctgattgatcaagctatccgaccctttcttgacaaatttgcgaaccctcaaaggttaaagctattagagattggccacgaccgacgtcagtcacggaagaattttagagcaatcgtacgaccattgcacgagcttactaagaagaacgctaagttccaatgggaagagcgacacgagcaagcatttacgcagattcgcgatgccatcaccaagaatctagtgctggtactaccagaccctaagaaaccattcaaggtggaaacagatgcttcagactacgctatcggaggacagttgggacaacgagacgagcaagggaagctatatcctgtagccttcttttcaaagaagctcgacggactacgtcttaactatctaatccacgacaaagaactacttgcgattgtcaaagcttttaaggaatggcgaccatatctcagtggcacgatcgaactagtataa

SEQ ID NO: 4481 - protein, 243 aa, Myceliophthora thermophilia
MKITTRTLARRMVATCDPERSRIRLARWGARKDRERTMLRGRHILRIYRKRWIVIKEGDEWKTAFRIPYGHYEYLVMPFGLTNAPATFQALIDQAIRPFLDKFANPQRLKLLEIGHDRRQSRKNFRAIVRPLHELTKKNAKFQWEERHEQAFTQIRDAITKNLVLVLPDPKKPFKVETDASDYAIGGQLGQRDEQGKLYPVAFFSKKLDGLRLNYLIHDKELLAIVKAFKEWRPYLSGTIELV

SEQ ID NO: 4482 - DNA, 849 bp, Myceliophthora thermophilia
atggctaacgaacacatcctcacgctatcctgcccggacaagccgggcatcgttcacgctgtgacgggcatctttgcgcgcgaggggcacaacattctggacttgcagcagttctccgacccgaccagtgaaaaattcttcatgagggtgcactttgggccgacgccgaccgagtcgactgagcacctccggccggcctttgactcgctgggccaagaatacagcatcagctatgagatccggccggtgacgcagaagcggcgggtactcatcatggtgtccaagatcgggcactgcctgaacgacctcttgttccggatcaagacgggccagctgcccatcgaggtgccgctgatcgtgtccaaccacccggactttgccccgctggccgcgagctacgggatcgagttccgccacctgcccgtcacgcgcgagaccaaggcggcccaggaggcgcaggtgctcgagctcatcaaggagcacaacatcgagctggtcgtcctggcccgctacatgcaggtgctcagcccgaccctctgcgaggccatgtcgggccgcatcatcaacatccaccacagcttcctgccctccttcaagggcgccaagccctaccaccaggcctacgaccgcggcgtcaagatcatcggcgccaccgcccacttcgtcaccgccgacctggacgagggccccatcatcgagcagcgcgttgcccgcgtcgaccacagcatggaccccaaggcgctcgtcgaggagggctccaacatcgagagccaggtcctcgctgccgccgtcaagtggtatgccgagggacgcgtcttcctgaacggcaacaaaacagttgtcttttaa

SEQ ID NO: 4483 - protein, 282 aa, Myceliophthora thermophilia
MANEHILTLSCPDKPGIVHAVTGIFAREGHNILDLQQFSDPTSEKFFMRVHFGPTPTESTEHLRPAFDSLGQEYSISYEIRPVTQKRRVLIMVSKIGHCLNDLLFRIKTGQLPIEVPLIVSNHPDFAPLAASYGIEFRHLPVTRETKAAQEAQVLELIKEHNIELVVLARYMQVLSPTLCEAMSGRIINIHHSFLPSFKGAKPYHQAYDRGVKIIGATAHFVTADLDEGPIIEQRVARVDHSMDPKALVEEGSNIESQVLAAAVKWYAEGRVFLNGNKTVVF

SEQ ID NO: 4484 - DNA, 966 bp, Myceliophthora thermophilia
atggcccccaggcgcccccagcggagagcgatccgcacggcggttgaccctgctcttcccacacccgatcagtcgacagagacaacaccggtcagctcggcttttccatcggcgtacccctccgaggcggagaacgagagcgacgccgaggagggaattctctctgcgccgatgacccccccggctactggtgccgtagtaccacagaccccgcctaagaagagacggattcccgagaagccttttcggttcctggacctgccttcagagctgcgcgtcgagatatacgcactccactttgaagggatcgaccaagtcgtcgacctggactcggacaactacaagcgcgtccacaagaagttggcgattttccggacgtgccggaccatctaccacgaggcttcgcatgtgttctacagcacccatacattccgcatattccccacgcagcccgggcgattcttcaagacgaagaaacccctgctcgcccgcctaaacacgaaccagcgccggtccatcacctcgctcgaactgcgcctcggcccgggctggaacaggcccccgcgcggctgggtcgtgaacgcggcgctcggcctgagcgagtgcgtcaacgtgcgccagctgaccgtctttgtcgagtgcgacccgagcgacagcgtcttcaagggtttccgcaaggcggacggcttctacgagaccttctcgcggaacctgctggacgacgtcttggcagagatgccgtttttggatcgcgtccatttcgacgcctggagcagcgtcaagaagacgggcgccatgatgacgggtctcctcgaggtcgcgagggcccgtggcaggaagatatgctggggtcccgagagggggtggagtgaggacgaggaggaggacgaggggggccagcgggacgagcacgagcagacaatggcgcagctacaggcagccatggcatttctgggcaccacgtaa

SEQ ID NO: 4485 - protein, 321 aa, Myceliophthora thermophilia
MAPRRPQRRAIRTAVDPALPTPDQSTETTPVSSAFPSAYPSEAENESDAEEGILSAPMTPPATGAVVPQTPPKKRRIPEKPFRFLDLPSELRVEIYALHFEGIDQVVDLDSDNYKRVHKKLAIFRTCRTIYHEASHVFYSTHTFRIFPTQPGRFFKTKKPLLARLNTNQRRSITSLELRLGPGWNRPPRGWVVNAALGLSECVNVRQLTVFVECDPSDSVFKGFRKADGFYETFSRNLLDDVLAEMPFLDRVHFDAWSSVKKTGAMMTGLLEVARARGRKICWGPERGWSEDEEEDEGGQRDEHEQTMAQLQAAMAFLGTT

SEQ ID NO: 4486 - DNA, 2475 bp, Myceliophthora thermophilia
atggatcctggaacattcgcgcccggaaatcccccgggcccaaacgagacaacatctcagccagagggtggccagctgatcatcccttctcaatatgaatacgatgctgtttccgagcagacttctgccgggctcgtcaaccagctcctggtcaggccgcacctgttggacgtggacgtggccgtgaggaggttctcgtcgccctccatacagcccggccagcaacggctgaccgagaacatggaggcggcgaggacggcgtatgccaaggccgttgtggcgatccagaaatccgtcaaggacatggacgccgtcaccatcctgacccgcagctccgagcatgacgtggcacagacggcgatcgagctcttcaactcgccctcgggcgaggataataaaggccgggtctcgcagttcatcgacatcctgcaccactattcgggcgtctttgacgtgctctcccaggcgggcgactttgcctacctggcagtggtgtggggtggaatcaagatgttgttgctcatggccaagaacaagaaagaactccttaccagggtgacggacatgctcgtcgagatcggcctctcgctctcgcgcatcgaggtgtacgccaagctcttcccgacggcgcgcatggtcgagctcgtgtccatgatctacgccgccgtggccgagttcctcgaggacgtgatcctccacttcgcccgcaagtcggccctgcgcctgcgcgtgctcctctccgccttcgtccgccccttcgacgagaagttcggccgcgccgtcgaccgcatccgccgcctcgagtcctgcatcgagaaggacgcgctgctgctgcacgccctccggaccaccagcatggcgcagcaccacctcggcgcctaccttcagcgggcgcacctgacgaccgccctggacgcgcacgcgcagccgcacccgctggaggagcccgcgccgtcgtcgtcgtcgtcgtcgtcgtccgtccccgctcccgctcctcccgtgccggcgctgctggaggaggtcaagcgggcgctcttccgcgggctgcgcgaccaggcgacgtaccacgagtcgctggcggcgacgtaccgcgtgacggcgagcgcttgggaggagtggttcgcggtcgagcagcggcacctcccctcctcctcctcaacctcctcaacctcctcaacgacgacgacgggcggcgcccggctgagccagggcctgtgcgacgcgccggaccaccaacacgcgctgcactgctacctcgtgtgggcgcccggcatgacggcgcaggcggcggtcgcgtcgctcgtcctgcaggtgctgctgcagcggcccggggccgtggtcgagctcgggctggaccggccgggcgtgttcgaccgcgcgcgcgactccatcgccgccctctgggggctcttcacctacctgatgcgcgccatgggcggcgggctggtgtacatgtcgatcgggtcggccggggaggaggagttcgccatcgtcgaccggttcgtccgcaccgtgcgcgcgtgggacggcccgcccatctgggtcaccatcatccacccgcacaacgggggattcgtgggcatcgaccgggccaccgacctggacgggctgtacgacgtgcacccgtcgctgaccaccacggacgcgctgcaccacgtgctgatgctcgagctcgacatccaccacgtctcggacacgatccagacggtgctgtgggaggccgcctggcgggagacgaggtatgcctcggtggggatcagcttctcgcgcgtcgtggccgtcatggaggacctggcgagggagctggcgacgaggaagacggacgtcgacaacgacggaggaggaggagcggatccggtgctgacggatgctgcgcgcgagcagtggatggagggcgtgaggaggtggctgagccacccgggcgcatccaactgcacgcgggagctggtccagaggcacctggacgtcgtgcccctggcgttccccgacgacgtccgtgccgaggtcgggcgccatctgaagcgtctcgtgctgcggatcgacgacgacgagagcaagaccaagtcgttcgcgtcccggtccatgaccgaagcacagcggcaccgcgtctgggatcacatgagggccgccatcgtcccgggctccgaggccatgttctgcgcgcacatccgggacctgatgtcggaggcgctgcaagtctttgccgagatgccgtgccacacgccgaagcaggcgacctacgtcgtggcgcgattgcttaacggccgattcggggccgacggggtctggaagagtaccatgccgacagacgcgcagctgatggtccacggtattaaggaggccgtcaagacgggatttgcgcgtaccatcgaggccttgtcggaaccggagggtgcgcacgaagtcgccgagatagagaggatgagaaggttttccattcaacatgctcttctcgccccatacggtgctaattaa

SEQ ID NO: 4487 - protein, 824 aa, Myceliophthora thermophilia
MDPGTFAPGNPPGPNETTSQPEGGQLIIPSQYEYDAVSEQTSAGLVNQLLVRPHLLDVDVAVRRFSSPSIQPGQQRLTENMEAARTAYAKAVVAIQKSVKDMDAVTILTRSSEHDVAQTAIELFNSPSGEDNKGRVSQFIDILHHYSGVFDVLSQAGDFAYLAVVWGGIKMLLLMAKNKKELLTRVTDMLVEIGLSLSRIEVYAKLFPTARMVELVSMIYAAVAEFLEDVILHFARKSALRLRVLLSAFVRPFDEKFGRAVDRIRRLESCIEKDALLLHALRTTSMAQHHLGAYLQRAHLTTALDAHAQPHPLEEPAPSSSSSSSSVPAPAPPVPALLEEVKRALFRGLRDQATYHESLAATYRVTASAWEEWFAVEQRHLPSSSSTSSTSSTTTTGGARLSQGLCDAPDHQHALHCYLVWAPGMTAQAAVASLVLQVLLQRPGAVVELGLDRPGVFDRARDSIAALWGLFTYLMRAMGGGLVYMSIGSAGEEEFAIVDRFVRTVRAWDGPPIWVTIIHPHNGGFVGIDRATDLDGLYDVHPSLTTTDALHHVLMLELDIHHVSDTIQTVLWEAAWRETRYASVGISFSRVVAVMEDLARELATRKTDVDNDGGGGADPVLTDAAREQWMEGVRRWLSHPGASNCTRELVQRHLDVVPLAFPDDVRAEVGRHLKRLVLRIDDDESKTKSFASRSMTEAQRHRVWDHMRAAIVPGSEAMFCAHIRDLMSEALQVFAEMPCHTPKQATYVVARLLNGRFGADGVWKSTMPTDAQLMVHGIKEAVKTGFARTIEALSEPEGAHEVAEIERMRRFSIQHALLAPYGAN

SEQ ID NO: 4488 - DNA, 468 bp, Myceliophthora thermophilia
atggcaactcaaaagccagttgttcgagtcggtgtcgccgcgatcatccaggacgtacagggacgacttgtcctcggcattcgcaaaggatctcatggcgaaggacaatggcaattaccaggcgggcatcttgagatgggggagagctactttgcgtgtgctgaacgggaggcgctggaggagacagggcttgtagtcaaggccgacaagttcgtcgccgtgacgagcgacatattcggccctgagaagcattatataaccctctttgtgtcatgtcggatggtgaaagagggacaagagcctcgggtcttggaacccgagaaatgcgagtgttgggagtggaaatcctgggctgacgtcagggcgcttatcgcgagcgaggatgggcgaacgaaagtttttctgcctatcgtaaacttgctcgaggatcatcctgacattgaggccctgaccgaggcgagccactga

SEQ ID NO: 4489 - protein, 155 aa, Myceliophthora thermophilia
MATQKPVVRVGVAAIIQDVQGRLVLGIRKGSHGEGQWQLPGGHLEMGESYFACAEREALEETGLVVKADKFVAVTSDIFGPEKHYITLFVSCRMVKEGQEPRVLEPEKCECWEWKSWADVRALIASEDGRTKVFLPIVNLLEDHPDIEALTEASH

SEQ ID NO: 4490 - DNA, 4059 bp, Myceliophthora thermophilia
atggctcacgaagattctgtcgttattatttcctcatcccccgattttccatcgatttgtgaccttctgccgaaagcgaccaagaagcccccattgcgaagtggcagcaatgccgccctaaccccttacgatgcgcccgtcacattcaccagcgccgcaagccagttgaagtcgtcgcatgcttctcaatcggagcgcacgagtccgcgcaagacacaggttgtgtcgggcgtgacagttacgaagtcacacgcccgcaatcctccgaccgagcgaccgccagaacccaatgcgcaaggcacgaacctcgaatcgaaagaggcgaacgaaaaactgaatgaaacggggattgtcacaaaggggaggaggagcgcaagacctggatcccgggaagtggcagcggagcccaggacaattgtgtcggtcgacgaggttcatccgcagcctgggggggggttaagtccagtccaaggttcagccgaggcggaaaacacgctaccgaagtccagagtcaggacgacagtaaaggaacggcgacccaaaaagaggaccgagaccgtcagccgacattttgctcctcagggttctgcgccgaagcctctacccgagttgattgcggatccgattgaagatgaatcggtcatgcttgagcccgcgatgaggcggaagagggattggacgcctcctcgtgagagtgtgcgaagttactgttcagccgactcttccacgacgaaggaaccacagtcttcgcaggacaatatcttcgaaacgctccaagaaacgtatggattcgttgcggaccctgccacgcatgtcaaagtcacattgccccttccggataccgaggtccttggaaaacgaaaaatcatcgaaatggcctcaatagggaacaagcaaaaatcaccagacgcctcccccacaaagccgaaagcaccaaaaaagagaccccggacgatcacggacctggcgacagcggcttaccgtccgtcagagaagcagagtgtcccttctgcggagacgcgcacgggttctttgtttacctaccttgaatcacccaaagagcaggcaacaatcgcgccgaaagatgcaagtgccaaaccgaaagcctcgagaggtaccaaggcaaaggctggcaagagaaaagagcagcctcccaaacctatccttctctccccgaccagtgctatgcgacaagtggccaaccaagacttcgtgtttgggacagcgagccagttggccaccgaagacgaccccgtacttctccgggcgctgcacgaggctatgcaagtgtcaaatcaagctgatagtggctcggatctcagccccagccctaagcctgtgaacagcaagctcgccgggcgcaaaaggccaggcgcgggactttgggccgctggcgctcgctacgatgacggtgacctgggtgtggatgtgctggatctgacacgctcttctcctctgcttctggataaaagtgccccggaagatctatatgcgaatcatgagccagcactttcagtcctttcacataaaaaggccggcatggaagtcgagctgccagatgacagttttgctctcagcagctcgccgccagtcggtcgccacaattcttcaccaccctccgcatcacgcaacattcggcaagcggtggtgcaacgtgatcaggggagttcttcattgaataaccatccgcagattactccagaagaatcggatttggggccaccgccgagtaaccaggaacaatacgacgagcttctgctgtcacaatccaacagctcacgacaagaggagcctgtgaggcccccagcaccgaactatgagatgtacagtgatgcacgtcttgccaaggaggttgcgtcctacggtttcaaagcggtaaagaaacggacggcaatgatagcgattctgaaacagtgttgggagagtcaaaacaagacgacatttggaagtagagctacctttgccgccatgtcgacatcatctacaaacggcagtggctcatctcccaagcccagggaccgggctggaaggagcactacgggtccgaggtccggtcttgaagggccggcgccaagtactcgccgtgggaaaaaatcggttacagctggtgccgccgccgagaccgaagcaccccaacctatgaagcggccccgcggaagaccaaggaagagttctacggcatcgtctgtttcgaatactacagaagcacgagcattctcgccagcgaattccgggcgagatattccagcttctgtcagggacactgagagcgaaggggctcgcgtcgaaaagcgtgcacagggccagacagggattgataacggtgcaatttcctcaaaccaggcaccgggggtaagaacggcaacatctccgaagaacgccagatgctcgccgaagcgaaccaaccctgctccatccacaccggggggaaagtcctcgtcaaaacaggtccttgaaatccccgactcggactcggacgatccctttggctcaaccccaggttcgtcaccagaaaggtgggctgacgcgttctcgccaccgccagcaatggatctctcggtgactgaagataccgagacgtcgctcatagccagcccgacgagccaccaggtgtccctcttccggtacattaccaaagcgattgtcaatgcgccacgagcgacaaacccggaggagccgagctggtacgaaaagatgctcatgtacgatccgatcattttggaggatctgactgcatggttgaactcggggcagctagacaaagtgggatatgacggggaggtatctcctggcgatgtcaagaagtggtgcgaaagcaagagcgtgcatcgccctcttcaccagacggcgatcacagtttgtggtgtcaaatcgctgcggccatcttcagctggcaaacagtcgccccttttcatccaccacaactttggtgcatgcgataacacgctcccgtctttcgaattcaaaccccagcaatatcagaagcggaacccgcggttcagccacgacaccgcccgctcgaaatacacggtcctgctccttcaccgggtgcagacctccacctccttcgcgtcggcgcatgtctttcccgggggcaacgtctcttccttccacgacggcccgctcccgccgctggatgacccagcgatccacgaggacggcccggcgtatcgactggcagccattcgtgagacctttgaggagagcggtatcctgctcgccaagaagcagggccgaggccgggatcagtgcctcctccacctgccggcccatgttctagaagaagggaggaagcagatccacggaaacaccgtcaggttcaccgagtggttggcaagccagggtggtgagccagacgtggaaaacctcgtcccctttacccgctggatcacccccccggggcctccgaagcgcttcaccacgcagatgtacctctacatgcttccgctcgacctccccccacccccacccagcagcggcgccggcggtgaaacaacagccaccagccacgacctcctgcttcggcagcacaggcccgccctgatcccaacgccgacccacgacggcggcgtcgagcacacggcggccgcctttgacgacgcgggcgcctggctggcgcgggcccgggccggcgacatcatcctcttcccgccccagtcctacctgctccacctcgtctcccagttctgctcgcccggatctaacgacaataaccagaacgactacggcgcccagcgcgccgccctgctcgccttcctgcggcgcaccccgacctcggcggtggccgaccgggcggggacgcgcatgatcccgtggtcggagaaagccatcagcccggcggtcctgttcgtgcgccggcgggacggccgggcggtgctggggctggacaagcccgggccggagctccgggggagcaggcggggcggcgactgggagagggtggtgctggtcgacttccggaaggaagggccccggaacgtggaggtccgcgacagggaggaggtgctgaaggaggagagggaggagggggacgcggacggggaggtggcgaagttatga

SEQ ID NO: 4491 - protein, 1352 aa, Myceliophthora thermophilia
MAHEDSVVIISSSPDFPSICDLLPKATKKPPLRSGSNAALTPYDAPVTFTSAASQLKSSHASQSERTSPRKTQVVSGVTVTKSHARNPPTERPPEPNAQGTNLESKEANEKLNETGIVTKGRRSARPGSREVAAEPRTIVSVDEVHPQPGGGLSPVQGSAEAENTLPKSRVRTTVKERRPKKRTETVSRHFAPQGSAPKPLPELIADPIEDESVMLEPAMRRKRDWTPPRESVRSYCSADSSTTKEPQSSQDNIFETLQETYGFVADPATHVKVTLPLPDTEVLGKRKIIEMASIGNKQKSPDASPTKPKAPKKRPRTITDLATAAYRPSEKQSVPSAETRTGSLFTYLESPKEQATIAPKDASAKPKASRGTKAKAGKRKEQPPKPILLSPTSAMRQVANQDFVFGTASQLATEDDPVLLRALHEAMQVSNQADSGSDLSPSPKPVNSKLAGRKRPGAGLWAAGARYDDGDLGVDVLDLTRSSPLLLDKSAPEDLYANHEPALSVLSHKKAGMEVELPDDSFALSSSPPVGRHNSSPPSASRNIRQAVVQRDQGSSSLNNHPQITPEESDLGPPPSNQEQYDELLLSQSNSSRQEEPVRPPAPNYEMYSDARLAKEVASYGFKAVKKRTAMIAILKQCWESQNKTTFGSRATFAAMSTSSTNGSGSSPKPRDRAGRSTTGPRSGLEGPAPSTRRGKKSVTAGAAAETEAPQPMKRPRGRPRKSSTASSVSNTTEARAFSPANSGRDIPASVRDTESEGARVEKRAQGQTGIDNGAISSNQAPGVRTATSPKNARCSPKRTNPAPSTPGGKSSSKQVLEIPDSDSDDPFGSTPGSSPERWADAFSPPPAMDLSVTEDTETSLIASPTSHQVSLFRYITKAIVNAPRATNPEEPSWYEKMLMYDPIILEDLTAWLNSGQLDKVGYDGEVSPGDVKKWCESKSVHRPLHQTAITVCGVKSLRPSSAGKQSPLFIHHNFGACDNTLPSFEFKPQQYQKRNPRFSHDTARSKYTVLLLHRVQTSTSFASAHVFPGGNVSSFHDGPLPPLDDPAIHEDGPAYRLAAIRETFEESGILLAKKQGRGRDQCLLHLPAHVLEEGRKQIHGNTVRFTEWLASQGGEPDVENLVPFTRWITPPGPPKRFTTQMYLYMLPLDLPPPPPSSGAGGETTATSHDLLLRQHRPALIPTPTHDGGVEHTAAAFDDAGAWLARARAGDIILFPPQSYLLHLVSQFCSPGSNDNNQNDYGAQRAALLAFLRRTPTSAVADRAGTRMIPWSEKAISPAVLFVRRRDGRAVLGLDKPGPELRGSRRGGDWERVVLVDFRKEGPRNVEVRDREEVLKEEREEGDADGEVAKL

SEQ ID NO: 4492 - DNA, 729 bp, Myceliophthora thermophilia
atgtcagaacagcgcgcaccagcacgtatgctcttgaacttcaagggcgtcgactaccgcaccgaatgggttgaatatccggacatcaaacccaccctcgagccacagtttgtcacccttcccccgtttccaaatccttctatggctcccgctctcgccaacgtccctccccacccccagaagccacagtatacgatccccacggtgcgcttcccggacgggcggtacgtgatggagtcgtttgcgatcgcgcgcgagatcgaggcggcccacccgacgccgtcggcgcggctggacgcgcccgtcgtggccgagctgatggcggcggtgccgcgcctgctgcacaagctgcgcgccgtcctgctccccggcgtgccgcggctcatcctcaacgagcgcagcaagccgtactggcacgagacgcgctccgcctgggttggcaagccgctcgacgagtgggagcgcgaggtggtcgccgccggcgagcccgactgggacggcgccgagcccgtcctgcgcgaggtcacggccctgctcaagaaggaggcagggggccccttcttcctcggcaacgaggccagctacgcagactttatctggggcggcttcctcatcttcttcgaccgcctcggcgtgtccgaagagctcctggccaggacgggcgacgccgacgcccaccgggcactgctcaaggggctggagccgtggaccgagaggagcgatcgctag

SEQ ID NO: 4493 - protein, 242 aa, Myceliophthora thermophilia
MSEQRAPARMLLNFKGVDYRTEWVEYPDIKPTLEPQFVTLPPFPNPSMAPALANVPPHPQKPQYTIPTVRFPDGRYVMESFAIAREIEAAHPTPSARLDAPVVAELMAAVPRLLHKLRAVLLPGVPRLILNERSKPYWHETRSAWVGKPLDEWEREVVAAGEPDWDGAEPVLREVTALLKKEAGGPFFLGNEASYADFIWGGFLIFFDRLGVSEELLARTGDADAHRALLKGLEPWTERSDR

SEQ ID NO: 4494 - DNA, 951 bp, Myceliophthora thermophilia
atgcttaccgaggcttcggtcgccgccctcagggaaacactctcgcactttgtccacggggttaccggaggccgtgcgatagacgcagaggcccttactctaacatctatcgacaagctccgtgccgctgtcgtgtcggagctccaagcatcgagtctcagggcccacttggactttattgactcaaagggccagctcaccctggggtgctatgtggcggccgactttacgtggtcgcacccgctcgagtaccaggttatagtggcgcagctcacccttttcttcttccacgccgaggacttgctggggcacaagcccgacgtgctccggcgcctgcagctcaacgtggccacaggacagccgtgcggcgacccggtatttgactggtacgcccgcgagctgacgccgcgcctgtggagcgtcttcgacccgctcgttgccaacatgatcgtcgtggcctgctatgacttcatcaatggcatcggcattgagcagctgacagagtgcgcctctgtgcacccacaggcacccaacttcccggactggttacgcttcaagacggggctctcgcccatgtactcgttgttggcgctagcacgggcttcagacctgaagctgcctacgggcgggctagcgaactatgtccaggtgatagccgacgtgatcaccttcaccaacattgtcaacgacgtcatctccttctacaaggagctgttggctggggagaaggcgaactacgttcagatgcgggcacagaaggacaaggttgacgtgttggcggcgctgcgcactctggccgacgagggtattcgcattcgggaccgcgtgctcgccacccttgccgacgagcccgagtatcttgccaactttgatgcatacgcgaaaggcatcacacactttcatacctcatccccgcgctaccgcttgtgcgagctgtttggaaaaccttga

SEQ ID NO: 4495 - protein, 316 aa, Myceliophthora thermophilia
MLTEASVAALRETLSHFVHGVTGGRAIDAEALTLTSIDKLRAAVVSELQASSLRAHLDFIDSKGQLTLGCYVAADFTWSHPLEYQVIVAQLTLFFFHAEDLLGHKPDVLRRLQLNVATGQPCGDPVFDWYARELTPRLWSVFDPLVANMIVVACYDFINGIGIEQLTECASVHPQAPNFPDWLRFKTGLSPMYSLLALARASDLKLPTGGLANYVQVIADVITFTNIVNDVISFYKELLAGEKANYVQMRAQKDKVDVLAALRTLADEGIRIRDRVLATLADEPEYLANFDAYAKGITHFHTSSPRYRLCELFGKP

SEQ ID NO: 4496 - DNA, 2316 bp, Myceliophthora thermophilia
atggtggctgctttacccaataacaacgcgacggttgctggggactcgtcagccacgcgtaacgacgagatgatcaagcagcagaggtctggctttacggccgtcattgaggctgacgacaacgacgacaccggcggcggcgtcttgcttcgcgatttcgaggatgacaactactccggccacggcgcgtcgactccgatgggtactaacagtagcagttcttctgcgaacagttgtgccacgcacccgcacaagaatccctcgaccgcgtccttcgcaacatcggtcccgtcaggccgttccaacgcattcgcgcccattggtactggccgcttctctgaacacatggtgacggccaacaacggcggcgcatggtttgcttccagtgacccctcgggtggtaataaggccacaggcaacagtgtccagagacacagcgactcaaccgtacggggccgcaacttcgtcacggacagcattcacgatccgacttgcctgaatgattatttgcagccgagcccccgtcatggaatacagcttagccgcagccaaggcttcattgatcctttcaacatgaccccgatcgcccaaggaggcgcgatgcagtaccctcagtctgcccatgccacgggttactcttggggcagtacgcctacataccgtactgcaggcaatacgtacaacacgccgcagaccaccggatatgccgctgctaaagacgccgtgtacgtgagcatggaggccaccccgtcgcatatgccaaagaaggttggcaagaacccgagtgcaactccacagtcgagttcggtctacaaccagtacaaccagactgagccgcgcaactttgcgccacgggccggagctcagtattacatgcctccccctccggctttcagcctgggccatcgtggtgctgctaccaagaggcacgaagagcccctgatcctgggaacggataccgaccccttcttgtcgccaccccccaggggcatcaacggccatggcatgtcccaggctcttgtcctgccgtctgttcccgagaacaatcagctggccatggtccatcaggcatggtacgactcggctcccgccgagatccgcgccatgcgctcagaccagctcaacaagctcactgacggcccaatgggtctcccggctcaagaagttgccctggacccagacaactttcccttcattgaggctactacccaagccaagcctgtcggccatggtgtcgtcaagatcaggaacattccttttggcaccaagcgcgccgaaatcattgcctttctcggtcgcaactccaagattctcaatgacaaccaggagccggtccacatcatcatggagcgcgtctcctccaaaacgcaggactgctatgtcgagtttgtgagcgcgcaggatgccgtgagggccgtggaccgccaccgcgacaacatgcagaaggggcgcccctcgcgcctgggtgaccgccctgtcgaagtacagctgtcgagccaggctgctctcatgaaggatttgttcccgctcgctgccggggtctggtgggacaatgccaaaccggtcatcctggcgccgattgacggccagccgtggaagaccttcaagggtttcgtcaccgaggaggagatgactatgctggtcaagcacgtcgagatcccgcagcggtctccctactccaaggagtgcccccagcgtccctacgagtgcatgatttccacgatcaagaagctgccctggtacatggccgaccacatcacgctccgccagcgccatgccatctacgacgccaccgttaggctcattgtgctcctgaagcaggccctgcagcgcgagcatcgcagccacgagacggtcatcaacccgcagctgatgaagcgtctggtcacggccgccatgctgtgcccgggcttctccgtcgtgcagaaggacaacatcgcggtgctcgccgacatggaggacgaccgcgcccgcacgttcaaccagcctcggttcgccgagcagtgggtgcacctgcacggcatctgccccaggcccggcacgcccctcgacgtgctcgagtggtacatcgccatcatccgcgaggagaccacgcgccgcgtccaccgcaagcacattgtcgagcgcagcgagatccagcgcaccgcctgctacacctcgctctactttggctacatgtggcacgagatcggcctgcccaccggcagagaactggacaacctcacccttcgccaggtcgcccgttgcgagctcgctgtcattgagcgcatcttgcgccgggtctttccagcccaggaggagtacgccctgaactaa

SEQ ID NO: 4497 - protein, 771 aa, Myceliophthora thermophilia
MVAALPNNNATVAGDSSATRNDEMIKQQRSGFTAVIEADDNDDTGGGVLLRDFEDDNYSGHGASTPMGTNSSSSSANSCATHPHKNPSTASFATSVPSGRSNAFAPIGTGRFSEHMVTANNGGAWFASSDPSGGNKATGNSVQRHSDSTVRGRNFVTDSIHDPTCLNDYLQPSPRHGIQLSRSQGFIDPFNMTPIAQGGAMQYPQSAHATGYSWGSTPTYRTAGNTYNTPQTTGYAAAKDAVYVSMEATPSHMPKKVGKNPSATPQSSSVYNQYNQTEPRNFAPRAGAQYYMPPPPAFSLGHRGAATKRHEEPLILGTDTDPFLSPPPRGINGHGMSQALVLPSVPENNQLAMVHQAWYDSAPAEIRAMRSDQLNKLTDGPMGLPAQEVALDPDNFPFIEATTQAKPVGHGVVKIRNIPFGTKRAEIIAFLGRNSKILNDNQEPVHIIMERVSSKTQDCYVEFVSAQDAVRAVDRHRDNMQKGRPSRLGDRPVEVQLSSQAALMKDLFPLAAGVWWDNAKPVILAPIDGQPWKTFKGFVTEEEMTMLVKHVEIPQRSPYSKECPQRPYECMISTIKKLPWYMADHITLRQRHAIYDATVRLIVLLKQALQREHRSHETVINPQLMKRLVTAAMLCPGFSVVQKDNIAVLADMEDDRARTFNQPRFAEQWVHLHGICPRPGTPLDVLEWYIAIIREETTRRVHRKHIVERSEIQRTACYTSLYFGYMWHEIGLPTGRELDNLTLRQVARCELAVIERILRRVFPAQEEYALN

SEQ ID NO: 4498 - DNA, 303 bp, Myceliophthora thermophilia
atggctaccgacaagttggtcaacgaggcctatgccaaaatcgaagcgctcgagactgccaaggcaagccgtatcaagatcgaactacctagtaaatatagaggaaccaaggaggatctcgtaggattcctgacaaacctccgatcttacttccggcttaataacgacaagtttccggacgacaaagccaaagtcctctacgtagccacaagactagagggtaaggcacttagatggttcgagcctacatggaacgactatctcattaaggaagacgaagacgaccgagacgcattcatatag

SEQ ID NO: 4499 - protein, 100 aa, Myceliophthora thermophilia
MATDKLVNEAYAKIEALETAKASRIKIELPSKYRGTKEDLVGFLTNLRSYFRLNNDKFPDDKAKVLYVATRLEGKALRWFEPTWNDYLIKEDEDDRDAFI

SEQ ID NO: 4500 - DNA, 1014 bp, Myceliophthora thermophilia
atggactacgacccgatggtgatggacgacgccgaggccttaggcccggttgtcaagatctcgcaagcggactcggtccgcgtcaagttcgagctccaaaatgccgatctctctttcgcaaactctctccgccgcgtcatgctcgctgagatcccgacgatagccatcgacttggtcgaaatcgaggagaatagctctgttctagccgatgagtttatttcccatcgcttgggcctcatccctctcaatgccgagggcgtcgataacctcttgtacgcacgcgactgcgactgcgacggctgctgcgaacactgcagcgttcgactcaccctccacgcaaagtgtactggcgaagagaatatgcatgtgtttgctcgcgacttggtgcctaccggagaccgcataaaccaggttctcggcaccccgatagtcaacgatgccgaagggctcggcccgctcatcctcaaactccgcccaggccaggagatcaagctcgaatgtatagcaaagaagggtatcgccaaggagcatgcgaagtgggctccttcggctgccattgggtttgaatacgacccgcacaacaagcttcgacacaccgattactggtacgagtcggatccgaaagcagaatggcccccaagcgaatacgccgcgtgggaggaaccccctcaagaaggcgagccgtttgattacgatgctgtgcccaaccgtttctacttcaacgtcgaaaccgccggtgccctcccgcccgacgtcatcgttagcgaaggcatcaaagttctccaacaaaagctggccggtctgatccacgaactcgccgaggacggcggagacggcacgaatggcgattacaacgggccgcgcagcccagaatacgggacaggagcggacgggtttggtgggtacacaacgccctttgggaacgccggtaaccagagctcctggggcggggctggcgggacaacgccctacgggacaactccctacggcgccggccagagcagttggtcatag

SEQ ID NO: 4501 - protein, 337 aa, Myceliophthora thermophilia
MDYDPMVMDDAEALGPVVKISQADSVRVKFELQNADLSFANSLRRVMLAEIPTIAIDLVEIEENSSVLADEFISHRLGLIPLNAEGVDNLLYARDCDCDGCCEHCSVRLTLHAKCTGEENMHVFARDLVPTGDRINQVLGTPIVNDAEGLGPLILKLRPGQEIKLECIAKKGIAKEHAKWAPSAAIGFEYDPHNKLRHTDYWYESDPKAEWPPSEYAAWEEPPQEGEPFDYDAVPNRFYFNVETAGALPPDVIVSEGIKVLQQKLAGLIHELAEDGGDGTNGDYNGPRSPEYGTGADGFGGYTTPFGNAGNQSSWGGAGGTTPYGTTPYGAGQSSWS

SEQ ID NO: 4502 - DNA, 1875 bp, Myceliophthora thermophilia
atggacaacagcgattggacaaatggaagctactctgaaaacgagtcacttagtgactcggacgaaggcagggagcatggagttgaaaagcctacgcccaacgtcggaaaatcaagggaatctgagactacaaatgtgcagcatcaggaagagtccgaggtgtccaaacctccccagacaccagggcagggaccgtccctggatgtccttactgagatcaggaagatcatcaaggaggagtggcagatatcaagtccctcatcgcccggggcaagcaccggcagagactcggcccagcagtccattcgacaggcagttccaaacacgtcagctgctagacctcaattgacgacccttcctgcacccgcccaacacaattctgctcctcggttgggaccggacgtggccgcgtgcgctcggccacaccccggtgtgcaatgcaccaacccttcaccgacacaggcgccacatccggttggccctacgcaagggtcgccaaaggagttgagtgctatcgaccgcaagtggggcatactgtttgaccagaacagcgttccaactaagaggtgggagcaggttatcagagggatctgcaactacctgatggcggagtacatgccccaaaactcgctcgtcgtgacaccagagaaaatggcggccttctactcgcaccacaagctcgatgtggaggtatttccctttgcagagatcttccgcaaccgccgtgacgtgccgccagtcaggctggcagaactgtaccagcaactggcatgtgaatactacctcgtacctgcagagcccaaggcccggccgacggtaccaggcctgacactcacggggtggacgcgatggatgacgatcgttacgcgagcctatcccgccgaggaggcgcaacgattgggcaaggtcgtcgccgcgctccccatcaacgccgacagcttgctcgacggcaagccggagagactgcctaagcagatatctcgccacctgctaccggagcggcccgaccgagaatctcgtgtagcggtcaaggatgctctcagagcccacttcgaagcaatacaacaattcccgtctaggaaaacaccttcctcagccaaccccccaaaccccaacagcgacagcggacgacgcgcgtccgtctccggtcccgttagtccccgcactcgctatcgcccctccgacataccctctccaccatgttcccagacaggcgacgacagcgacgagcatcaccactaccatcatcgcagacggaccgccgaccgcgacagcgacagaggtgaccggggttatcgtgacggtgctggccacctccgcacatacggaagcagtggcgcggctccccgtgacgtacccctccctttccctccctccctcgcagccacggctctttcatcctcctcatcacgtcccccgcttagctcgaggaggcgaagtagtccgccgctgccagccgaccgtaacagcagtgactacaggcaccatactcagaggaactctatttcggggttcagtgacggtagtggtgatgtcgtggccggaggaggaaaaggcggccccgaaaggagtcacacgtggtcgaacctgccgcggcggcggctgtcgtcgtcgtcgtcatggtcgtcgtccgacgagcgggagagggataggggaggaatgagaacaagggacggtcgcgaaatcagggaaatggaccgtgaacggggtcgagtcagagagacggggagggagagggatctacgagagagagatcgcaagaaagcggacagatcgctgctgagggaacgcgggcgggagacgaaagaaagagttagggaaagggatagggatagggagagggttaggagggaaagggcgagggagagacggtag

SEQ ID NO: 4503 - protein, 624 aa, Myceliophthora thermophilia
MDNSDWTNGSYSENESLSDSDEGREHGVEKPTPNVGKSRESETTNVQHQEESEVSKPPQTPGQGPSLDVLTEIRKIIKEEWQISSPSSPGASTGRDSAQQSIRQAVPNTSAARPQLTTLPAPAQHNSAPRLGPDVAACARPHPGVQCTNPSPTQAPHPVGPTQGSPKELSAIDRKWGILFDQNSVPTKRWEQVIRGICNYLMAEYMPQNSLVVTPEKMAAFYSHHKLDVEVFPFAEIFRNRRDVPPVRLAELYQQLACEYYLVPAEPKARPTVPGLTLTGWTRWMTIVTRAYPAEEAQRLGKVVAALPINADSLLDGKPERLPKQISRHLLPERPDRESRVAVKDALRAHFEAIQQFPSRKTPSSANPPNPNSDSGRRASVSGPVSPRTRYRPSDIPSPPCSQTGDDSDEHHHYHHRRRTADRDSDRGDRGYRDGAGHLRTYGSSGAAPRDVPLPFPPSLAATALSSSSSRPPLSSRRRSSPPLPADRNSSDYRHHTQRNSISGFSDGSGDVVAGGGKGGPERSHTWSNLPRRRLSSSSSWSSSDERERDRGGMRTRDGREIREMDRERGRVRETGRERDLRERDRKKADRSLLRERGRETKERVRERDRDRERVRRERARERR

SEQ ID NO: 4504 - DNA, 1779 bp, Myceliophthora thermophilia
atgcctccgcgaaaggagatgtcatcgccaacgaagcgccgtccgcctctaggcgctgggccccaaggcaacagcgccagcgccccccgctctcctccgcgaacatcccgcacctcaccatccgccgcaaggaacaccaacgccggcaccaagactggcaacaatttcaccgctacttccggagctagcacagttatccccccgccccctcgagctgctctaagcggaacctcctccccaacacccgatcacccgcgcaacgacaaaaacagtcacacagcgaaagacagcccccgcctggccccaaactccgccagccacaaccgctccccctcaccggcgcttcctgtacccctcgaccagccagccgcatcgtcttccttcccatccccgtcgtcgtcgtcgtcgtcgtcgccgccgccatcatcatcagcagcctcagtgggcgacatggagacggccctccgcgagaaggacgcgcgcatcgcgtcgctcgagcgcgagctggccctcatggagtccgagttccaccgggagttggataagctcagcggcgccgagagcgcgacggccgccttttggcagagcaaatacgccgcgctggaaaagacgcttgagggcgtgctgagcttgcagcagcagcagcagcggcggcgggggcgggggcagcaaaagtcgggccgagacggcggtgggagaggtcaagacgagtacgctgcgtctgggaaggatgacggggacgacgatgcggagagtgagcacgaccgagaccgggacacggtgaggggcatggagatggcaatgttggccaaagagggcgaactgagggaggtcagggcggcgtgggaacgggcaagggacatgctgggtaaaaaggaagacgaggtggccgagctcagggcccaagtcagggggctcaaggaatgggttagccacagcaccagggcggacgtcgaggcgcagacgagtgacgaggtattcggagagggtatggccaagctgggaaacgggttgcagaactgggtcctggtaaactttaggcgggcaaagatcgacctctctagtgcggatgaggattccatatcggaactgtcgcgtttggtgcccatgtacgaagagctagcctcggcctcgaaaatccatttgcttcagtcgatcgtgtcgcggttgcttgtggaactcgtgtttgacgcgtactttgttggtctcccgggcgaggcggccgggcagatcaagcaggtggaggcgtttctctcttcagtttcgtcgcccgaatccatcaatcaatggcgctctttcactctgaccatgctcaagagagatgccacgcagaaactacagaccgaaacgtcggcggttgttgaagcagtcgtgtccagggtcaacaaacttctggactcgataacgagcacgaattcgacagaatccagaaatcagggcttacaggcactggtcaacagcgccatcgagctgtcgcggctgctggccgtgcagaaggcggtcttcaggatcgagatgcccgagatccttccccaccagcgtatcatgttcgatcccgagaccatggaagatatcgggggcgaagacgaagaaagcctgatggacagagagatctgttgcgtcacatttccaggaattgtcaagcggggcgatcagagcggcggacatctgcagtaccggaatgtcatttgcaaggcaaaggttctctgcagtccagagggctccgatgagactgccggtcagtcatcccaagttcacgtcggtctctatggcccataa

SEQ ID NO: 4505 - protein, 592 aa, Myceliophthora thermophilia
MPPRKEMSSPTKRRPPLGAGPQGNSASAPRSPPRTSRTSPSAARNTNAGTKTGNNFTATSGASTVIPPPPRAALSGTSSPTPDHPRNDKNSHTAKDSPRLAPNSASHNRSPSPALPVPLDQPAASSSFPSPSSSSSSSPPPSSSAASVGDMETALREKDARIASLERELALMESEFHRELDKLSGAESATAAFWQSKYAALEKTLEGVLSLQQQQQRRRGRGQQKSGRDGGGRGQDEYAASGKDDGDDDAESEHDRDRDTVRGMEMAMLAKEGELREVRAAWERARDMLGKKEDEVAELRAQVRGLKEWVSHSTRADVEAQTSDEVFGEGMAKLGNGLQNWVLVNFRRAKIDLSSADEDSISELSRLVPMYEELASASKIHLLQSIVSRLLVELVFDAYFVGLPGEAAGQIKQVEAFLSSVSSPESINQWRSFTLTMLKRDATQKLQTETSAVVEAVVSRVNKLLDSITSTNSTESRNQGLQALVNSAIELSRLLAVQKAVFRIEMPEILPHQRIMFDPETMEDIGGEDEESLMDREICCVTFPGIVKRGDQSGGHLQYRNVICKAKVLCSPEGSDETAGQSSQVHVGLYGP

SEQ ID NO: 4506 - DNA, 2436 bp, Myceliophthora thermophilia
atgcgcttcggcaagacactccgccaatcggtctatgcgccctgggcggacaagtacatcgattatgccaagctgaagggcatcttgcgcgaggacaggttcgacgacgaggacgagccatggaccgaggacgacgagaatcgcttctgcgacgagatcttcaatgtgcagctcgagaaagtcgcccagttccaggctgagaaggtcgatgacctgcgccgccgcgtggacagcgcattcgagaagctcaaggagctgcccgccgcccccgacgccgccgccgccgccgaggaaggccagccgaagaggcccgctgtcgaccccgggcagctcaaggagctcgagggcgagctcgacaccatcaccaacgagatcaaggagctgcagaaattcctcaagattgtgaagaagcacgaccggaagcgcggcgaccgctacaagatccgccccatgatgatgctcagcctgtcgaggcggcccttcaactcggagcaggcctaccggccgctgctcaacaagctgtcgctcatgtactttgccatccgccagcagctcgaggagcccgggtcggccgacggctacggttaccccgtcgatcccgacagccagccggagatgcacaacggcgagaggtacacggcgcacaagttctgggtccacccggacaacctgctcgaggtcaagacgtacatcctccgccgcctgcccgccttggtctacagcgagcagtcggccaacgaggtggacgggcagcaggatccgaccatcacgtctctctacttcgacaacccccggttcgacctctacctgaacaaggtcgagcggaagacggaggcgtcgtcggtgcgcctgcgctggtacggccagctcagctcgcgcccggacatcttcctggagcagaagctggtccacgacaacggcagcagcgaggagcgcaagttcgtcatcaaggagaagtacgtcaagccgttcctggacggcgagtacgggatggagaagtcggtgcagaagatggagaggacgggccggacggccgacgacgtggccgccttcaagtcgaccgcggacgccatccgcgactttgtgcgcgccaacaagctggagccgctgctgcgggccaactacaagcgcaccgccttccagaagccgggcgacgaccgcgtgcgcatctcgatcgacaccgacatcgccttcatccgcgaggacacgctcgaccgggcccggccctgccgcgacccgaagagctggcaccgcgccgacatcgacgacggcaacatgacgtaccccttcggcaacatcaaccagtccgaggtctcccgcttcccctacgccgtcctcgaggtcaagctgagggaggacggccggggcaagcggccgtcctgggtcgaggacctgatgggctcccacctcgtgcacccctgcccgcgcttctccaagttcgtccacgggacggcctgcctgtttgaggactacgtcaaccggctgcccttctggctctcggacctcgacaccgacatccgcagggacccccaggtcgccttcgaggaggaggagtcgcggcgcgcccagcgggccgagaacgagcaggtggtcggcagcctcctcggcaccagggtcggcagcggcggcggcggcggcggcggcggcggcggcttcggctcctacaagccctcgcgcagctcgcccgtcgccaagtcttacctcgccgaccgcgccgcggccgacgcgtccctcgcgcggaccccctccaagtcggcggcagactttgcccgccggagaagaagcagcgcagccacggccgccggccacgcggacgagacgggcgagccgagcacggcccgcggcggccggccggagcgccaacaaccgccagacgagcaggagagccgccgcggccttaactacggcaccctctcgtccgtcttcccgagcttctcctccctatccaagtacgcgcgggccaagcaggcccgcgagggcgcgcggcggggcagcctcgcgtcgtcgtcgtcgacgtcgtcgtcgggcggggggaggccctcctcgctcccgcccggggtggtggagccgaccgaatggatcaagaacgcgggcccgctgcagatcgagcccaaggtgtggctggccaacgagcgcacgttcctccggtggcagcacgtgtgcgtgctgctcggcggcctggccgtcagcctctacacggccgccgccgcccggggcaacgcgctggcccgggccgtcggcgccgccctgctcgccgtcgccgtcttcgccggcgcctggagctactgggtcgtcgtccgccgccgcaacatgattgtccagcgcagcggcaaggatttcgacttcctcttcggtcccctcgtcgtcagcttcgccctcgccgtcgccctcgtcgtcaactttgtcctggcgcattctgtgctcttttatttttaa

SEQ ID NO: 4507 - protein, 811 aa, Myceliophthora thermophilia
MRFGKTLRQSVYAPWADKYIDYAKLKGILREDRFDDEDEPWTEDDENRFCDEIFNVQLEKVAQFQAEKVDDLRRRVDSAFEKLKELPAAPDAAAAAEEGQPKRPAVDPGQLKELEGELDTITNEIKELQKFLKIVKKHDRKRGDRYKIRPMMMLSLSRRPFNSEQAYRPLLNKLSLMYFAIRQQLEEPGSADGYGYPVDPDSQPEMHNGERYTAHKFWVHPDNLLEVKTYILRRLPALVYSEQSANEVDGQQDPTITSLYFDNPRFDLYLNKVERKTEASSVRLRWYGQLSSRPDIFLEQKLVHDNGSSEERKFVIKEKYVKPFLDGEYGMEKSVQKMERTGRTADDVAAFKSTADAIRDFVRANKLEPLLRANYKRTAFQKPGDDRVRISIDTDIAFIREDTLDRARPCRDPKSWHRADIDDGNMTYPFGNINQSEVSRFPYAVLEVKLREDGRGKRPSWVEDLMGSHLVHPCPRFSKFVHGTACLFEDYVNRLPFWLSDLDTDIRRDPQVAFEEEESRRAQRAENEQVVGSLLGTRVGSGGGGGGGGGGFGSYKPSRSSPVAKSYLADRAAADASLARTPSKSAADFARRRRSSAATAAGHADETGEPSTARGGRPERQQPPDEQESRRGLNYGTLSSVFPSFSSLSKYARAKQAREGARRGSLASSSSTSSSGGGRPSSLPPGVVEPTEWIKNAGPLQIEPKVWLANERTFLRWQHVCVLLGGLAVSLYTAAAARGNALARAVGAALLAVAVFAGAWSYWVVVRRRNMIVQRSGKDFDFLFGPLVVSFALAVALVVNFVLAHSVLFYF

SEQ ID NO: 4508 - DNA, 2271 bp, Myceliophthora thermophilia
atggcagacgaagcggccgacgtggccgaggattatcggcaagccctggaagatctcacggttaactctcgtatcgagatcgcgacattgaccaacatcgcgcgagagaacgcaagtcacggcttcgctattgccgaggtgctggcgagccacatcaaaaagctaatgtttatgtttttgcacaaggcgcctcccacacgaaccctaccggcgctgtacgtcctcgattccgtcgtcaagaatgtcccgacgccttacgcgctctatttcggcccgaagctctattccatcttcatgggtgcctacaccaaggtggacaacgcgacaaggcgaaagatggacgagatgctcaagacatggaaggaaccggtgccgggctccctatcgaccaagccggtcttcccccccgagcaggtccggccgatcgagaacgctctgatggcggcccggaacgccgcttatgccgcccagcaaaacagctaccagggccagcagcagctcatgcgcggccgcccgcccgccccgagccgagacacgccgacacctcccactgcgaggtcatttccacccccacagcaacccccttatccaggatccaacggacatcggccagacgcggcgccgcagccgtatccgatgcatccaggaggcaatccaagtgcgatccctcaccgtgcaacaccgcagcctgctccgtctgccgggccttatcccccttaccagcctccggcggcggggtcagtctatggcactccgcaaccagggataagcatagacaagttgaaagatgatatccagcaactgatcattgcggaaagggcggaatttgcacagaatccacttgatactagtaaacagaccagactgaaggcgttgctggacttgcaaacaataatccagagccaagacatgcctcaggatcagttgatgatcattagagatcgagttgctgaacttgctgtaaaaatacgcccgcagccgccagccacggccggccctgctgggagcggtgtgaccgcgcccaacaccgcgtatccaggagtttcgtacaccagcactccaacaccgccggctgtgtctcagcagccgacgcccgtgccctcgacagccgcggcggcggtcgccgcggctctggcgcgtccttcatccgctgcgccggctcctccggctccaagcgggggcctgtcaatcgattcgatcttcggccaaggcgccctggcgacactcttgtcagaagccgcgcggaagtcggccacgcctcagcagactcccacaccacagcctcctcccccggcagcccctagcccggccatcggaccggcggcggcggcagcaatagcggctgcgttgcggccgccgccttcgcaagggtctaccgaaccacccaaatccgcagccactgttgcttccgcacccgctcccgctcccgctccgcctcctcctgctgctgctcctcttccgacagacccgtcagcgctgctggccctgttgagacagtccggtcttctcaaacccggcgccacaccaacacccgctccggcgactcccgtgccgcccggtctgggatcgggcggtcaccagtcccttgccggcgtctcgtccacgccgactggcaacccgcagctcaccactacttcgttgaagaccttccgcccacatctgatcgcgcaactccacgaaaacctcggtccgccctgcactcaatgcggccgccgcttcgggacggacgaggaagggcgccgcaggaaaatggcacacatggattggcatttccgcgtccaccagcgcatgaacgacgccgagaagcgcgggcagcatcgcagctggtatgtcgacgagacggactggatccggtcccgcgaagccatcgacgcggactatgcccacccgcaggatgcctcgtcctcctactactactcctccgacggccggcaccactcctcttccgcatcgcctgctgccctccaccacacgacgatcaacaccaagcggcaaggcggctcctccgcggcgggcgcctccgccgcctcccgggtcccgaagaagttcgagatgaagtggctggacgaggcgcaggagtgggtgtggacggacgcggtccgggtcggggagcgcgtcttccacgcgacctgccatcgcgaggcctacggcgtcttgccgttgtccgaagggggccccggctcggcttcgggatccggggtgttggggaagaggaaagccgaggacgaggctggtgggttgagggggaagttgaaaatggagggatactga

SEQ ID NO: 4509 - protein, 756 aa, Myceliophthora thermophilia
MADEAADVAEDYRQALEDLTVNSRIEIATLTNIARENASHGFAIAEVLASHIKKLMFMFLHKAPPTRTLPALYVLDSVVKNVPTPYALYFGPKLYSIFMGAYTKVDNATRRKMDEMLKTWKEPVPGSLSTKPVFPPEQVRPIENALMAARNAAYAAQQNSYQGQQQLMRGRPPAPSRDTPTPPTARSFPPPQQPPYPGSNGHRPDAAPQPYPMHPGGNPSAIPHRATPQPAPSAGPYPPYQPPAAGSVYGTPQPGISIDKLKDDIQQLIIAERAEFAQNPLDTSKQTRLKALLDLQTIIQSQDMPQDQLMIIRDRVAELAVKIRPQPPATAGPAGSGVTAPNTAYPGVSYTSTPTPPAVSQQPTPVPSTAAAAVAAALARPSSAAPAPPAPSGGLSIDSIFGQGALATLLSEAARKSATPQQTPTPQPPPPAAPSPAIGPAAAAAIAAALRPPPSQGSTEPPKSAATVASAPAPAPAPPPPAAAPLPTDPSALLALLRQSGLLKPGATPTPAPATPVPPGLGSGGHQSLAGVSSTPTGNPQLTTTSLKTFRPHLIAQLHENLGPPCTQCGRRFGTDEEGRRRKMAHMDWHFRVHQRMNDAEKRGQHRSWYVDETDWIRSREAIDADYAHPQDASSSYYYSSDGRHHSSSASPAALHHTTINTKRQGGSSAAGASAASRVPKKFEMKWLDEAQEWVWTDAVRVGERVFHATCHREAYGVLPLSEGGPGSASGSGVLGKRKAEDEAGGLRGKLKMEGY

SEQ ID NO: 4510 - DNA, 1875 bp, Myceliophthora thermophilia
atggcgtcgtcgtggctttcggtcaacacatccgggagtccagatccgaccatcgatgcagctaaccttgggcttacaagcggcgttacaagcacggcaggtgcttgggaatccccgggatccacgccacacggttatagcgccaatcctcccacggagcttggacgcaagcgcagcttcgccgcgtccgcggttcccatcccggcgatcgctagtaacggcagcggcgccgacgccggcgccggcgctgccgcgaaccacggttcgggggagcagcatcccgagccgggcagcagcgaacacggcacgccatcaacagcaacacaacagcaggcagcgcccgggtcccataatgccgccgccatagacggcacacaggctgggggtgcgcccaagaagcgcaagaccggccgggggccccggggcgtgggcaacctgaccccggagcagctggagaggaagcgagccaatgaccgcgaggcgcagcgtgccatccgcgagcgtcagcgtctccggacggaacagtacgagcgcgagattgccgccctcaagtccatgcagccgtaccaggagctgcagagagtcattcgccagaaggaggccgtcgaggcagagctcgcaggcctgaagaggcgcatggctgccatcgtggccatgatccaacctgttctcggcggcacatccgatgggcctgctccgcctgattgttcagcggcgccgtttcagtctcagggtcggagccattccctcacccaaccacccgcggcaacaaccactcacaacgccgggtccacgcaaacgagcgtgccctcgccggcgtccgtggagactcagagccggtggcaacacagcttgtcccctatcgcgcccaccgtaggcgtcgacgagcagcagcagcagcagcagcaaccgctgccgccgcagccgtttccagaaacggttttgttcaaccagcaacgatatgaccttgcccacggcctagacctgggctctgacaagctcggtctggagttcttggtcgatcccaagctcaagatcgccagaatcaagagcggcatcgagggcgcccaggactcgccaaaatatcaccacctacccatgaagcacgactggaccgcgaccgtgtctatgataccgggtctgcaagcgacagcaccgacgccgacccaggttcactcccccgtttacaaccaggcacccgtcgccgctcccagcggtctccccgcgcccccgacgcccggcgcggcggccgcctcgggaccgcccacggcccggcccactcccatctacgccctcactccgcgcaactgcccgccaacctgcccgctcgactccatactcgtcgacttcctctcggagcggcgccagcgcgccgccgaaggcctctcgcaatccgagatcctggggccccgctacccctccgtctcgtcgctcctcaaccccgccgtgtcgctctactcacacccgctctccaaggtcttcaccgacatactcgcccgcttcccggacctgtcggccctcccggagcgcgtggccgtcctgtacgccatgttcctcctcatgcgctggcaggtgtccccgacgcaggagaattacctccgcctgcccccctggttccgccccgtccgccagcagaccgagaaggagcacccggcctggttcgaccacatcccgttcccccgcatgcgggagcgcctggtcagcggctacgaggacggcgccttcccctttgacaacttcttcatccccttcacctcgaccctgagcctcaactggccatacgaggacgcctacgcgctgctggccagccccacgggcgacgagctcatgatcaatcccgtctttgagcagcacatgaggaagctggagaactga

SEQ ID NO: 4511 - protein, 624 aa, Myceliophthora thermophilia
MASSWLSVNTSGSPDPTIDAANLGLTSGVTSTAGAWESPGSTPHGYSANPPTELGRKRSFAASAVPIPAIASNGSGADAGAGAAANHGSGEQHPEPGSSEHGTPSTATQQQAAPGSHNAAAIDGTQAGGAPKKRKTGRGPRGVGNLTPEQLERKRANDREAQRAIRERQRLRTEQYEREIAALKSMQPYQELQRVIRQKEAVEAELAGLKRRMAAIVAMIQPVLGGTSDGPAPPDCSAAPFQSQGRSHSLTQPPAATTTHNAGSTQTSVPSPASVETQSRWQHSLSPIAPTVGVDEQQQQQQQPLPPQPFPETVLFNQQRYDLAHGLDLGSDKLGLEFLVDPKLKIARIKSGIEGAQDSPKYHHLPMKHDWTATVSMIPGLQATAPTPTQVHSPVYNQAPVAAPSGLPAPPTPGAAAASGPPTARPTPIYALTPRNCPPTCPLDSILVDFLSERRQRAAEGLSQSEILGPRYPSVSSLLNPAVSLYSHPLSKVFTDILARFPDLSALPERVAVLYAMFLLMRWQVSPTQENYLRLPPWFRPVRQQTEKEHPAWFDHIPFPRMRERLVSGYEDGAFPFDNFFIPFTSTLSLNWPYEDAYALLASPTGDELMINPVFEQHMRKLEN

SEQ ID NO: 4512 - DNA, 2763 bp, Myceliophthora thermophilia
atggcggaacccacgtctaccggcgctcctgcgctgtcgacgaatattgagagcggaaattttgacgagaaggcccaacacgacgtgccccccgccaaggtgcccgtcgaggaggaggaggaggatgaggacattgacgccctcatcgatgacctcgagagtcacgatggccatgaccagtttgaggaggaggaagatgtcactcccggcggcgcccgcgtcgtccccgaggacatgctccagactgacacgcgtgtcggtctcacaaacgaggaggtcctccagcgtcgtcggaaatatggtctcaaccagatgaaggaggagaaggaaaacctccttctcaagttccttggtttcttcgtcggccctatccagttcgtcatggaggccgctgctgtcttggctgctggtctcgaggactgggtcgatttcggtgtcatctgcggtctgttgcttctcaacgccgctgtcggtttcatccaggagtaccaggctggctccatcgttgacgagctgaagaagactctcgctcttaaggctgttgttctccgtgacggtaccctgaaggaggtcgaggcccccgaggtcgtccccggcgatattctgcaggttgaagagggtaccatcattcccgccgatggccgcatcgttaccgatggtgccttccttcaggtcgaccagtctgccatcactggcgagtcgctcgctgtcgacaagcacaagaatgaccagtgctatgcctcctcggctgtcaagcgtggcgaggccttcctggtcgtcactgccactggtgacaacaccttcgtcggtcgcgcggctgccctcgtgaacgctgctagcgctggcactggtcacttcaccgaagtgctcaacggcattggtaccatcctgctggttctcgtcatcctcaccaacctggttgtctgggttgccagcttctaccggtccaaccccatcgtcctcattctcgagttcaccctggccatcaccatcgttggtgtgcccgtcggtctccctgccgtcgtcaccaccaccatggctgtcggtgccgcctacctcgccaagaagaaggctatcgtccagaagctctcggccatcgagtctctggctggtgtcgagattctgtgctctgacaagacgggtaccctgaccaagaacaagctctctctgtcggagccctacaccgtcgccggtgttgaccccgaggacctcatgcttactgcctgcttggctgcctcgcgcaagaagaagggcatggatgccatcgataaggcttttctcaagagcttgaagtactatccccgcgccaagggtgtcctcagcaagtacaaggttctcgagttccaccccttcgaccctgtctccaagaaggtcacggccgtcgtcgagtctccccagggcgagcgcattgtctgcgtcaagggtgcccctctgttcgttctcaagaccgtcgaggaggaccaccccattccggaggaggttgaccaggcctacaagaacaaggtcgccgagttcgccacccgtggtttccgctctctcggtgttgcccgcaagcgtggcgagggctcttgggagatcctcggtatcatgccttgctcggaccccccgcgtcacgataccgctcgcaccatcaacgaggccaagtcgctcggtctgtccatcaagatgcttactggtgatgccgtcggtatcgctagggagacttctcgccagctcggtctcggcaccaacgtctacaacgctgagcgccttggtctcggtggcggtggtgacatgcccggctctgaggtgtacgacttcgtcgaggctgccgatggtttcgccgaggtgttcccccagcacaagtacaacgtcgtcgagatcctgcagcagcgtggctacctcgttgccatgactggtgatggtgtcaacgacgctccctcgctcaagaaggccgatactggtattgccgtcgagggtgcctcggacgctgcccgctctgctgctgatatcgtcttccttgcccccggtctcggtgccatcattgatgcgctcaagacgtctcgccagattttccaccgcatgtacgcctacgtcgtctaccgtatcgccctctcgatccatctggagatctaccttggtctctggattgccatcctgaaccgcagcctgaacatcaacctggtcgtcttcattgccatcttcgccgatgtcgccactctggccatcgcctacgacaacgccccgtacagcaagacccccgtcaagtggaacctgcccaagctctggggtatgtcggtgctgctcggtattgtcctggccatcggtacctggattactgtcacgaccatgtacgcgcacggtccgaacggcggtatcgtccagaacttcggtaacatggacgaggtcgtgttcctccagatctcgcttactgagaactggctgatcttcatcactcgtgccaacggtcccttctggtcctcgattccttcgtggcagctggccggtgccgtcctggtcgtcgacatcatcgccaccctcttcaccatctttggttggttcgagaacagcgacacgtccattgtcgccgtcgtccgtgtctgggtcttctcgttcggtatcttctgcgtcatgggtggtctctactacatgttgcaggacagcgtcggctttgacaacctcatgcacggcaagtcgcccaagggcagccagaagcagcgctctctggaggacttcgtcgtctctctccagcgtgtgtcgacccagcacgagaagtcgcagtag

SEQ ID NO: 4513 - protein, 920 aa, Myceliophthora thermophilia
MAEPTSTGAPALSTNIESGNFDEKAQHDVPPAKVPVEEEEEDEDIDALIDDLESHDGHDQFEEEEDVTPGGARVVPEDMLQTDTRVGLTNEEVLQRRRKYGLNQMKEEKENLLLKFLGFFVGPIQFVMEAAAVLAAGLEDWVDFGVICGLLLLNAAVGFIQEYQAGSIVDELKKTLALKAVVLRDGTLKEVEAPEVVPGDILQVEEGTIIPADGRIVTDGAFLQVDQSAITGESLAVDKHKNDQCYASSAVKRGEAFLVVTATGDNTFVGRAAALVNAASAGTGHFTEVLNGIGTILLVLVILTNLVVWVASFYRSNPIVLILEFTLAITIVGVPVGLPAVVTTTMAVGAAYLAKKKAIVQKLSAIESLAGVEILCSDKTGTLTKNKLSLSEPYTVAGVDPEDLMLTACLAASRKKKGMDAIDKAFLKSLKYYPRAKGVLSKYKVLEFHPFDPVSKKVTAVVESPQGERIVCVKGAPLFVLKTVEEDHPIPEEVDQAYKNKVAEFATRGFRSLGVARKRGEGSWEILGIMPCSDPPRHDTARTINEAKSLGLSIKMLTGDAVGIARETSRQLGLGTNVYNAERLGLGGGGDMPGSEVYDFVEAADGFAEVFPQHKYNVVEILQQRGYLVAMTGDGVNDAPSLKKADTGIAVEGASDAARSAADIVFLAPGLGAIIDALKTSRQIFHRMYAYVVYRIALSIHLEIYLGLWIAILNRSLNINLVVFIAIFADVATLAIAYDNAPYSKTPVKWNLPKLWGMSVLLGIVLAIGTWITVTTMYAHGPNGGIVQNFGNMDEVVFLQISLTENWLIFITRANGPFWSSIPSWQLAGAVLVVDIIATLFTIFGWFENSDTSIVAVVRVWVFSFGIFCVMGGLYYMLQDSVGFDNLMHGKSPKGSQKQRSLEDFVVSLQRVSTQHEKSQ

SEQ ID NO: 4514 - DNA, 1362 bp, Myceliophthora thermophilia
atggctgctccccacaagttcgagacgctccagctccatgcagggcacgagcccgacacggctaccaattcgcgggctgttcccatctacgccaccaccagctacgtcttcaatgactcggctcacggcgcccgcctcttcgggctcaaggagttcggcaacatctactcccggatcatgaacccaacggtggacgttttcgagaagcggatcgccgctctcgagggcggtattgctgcggtggccgcctcgtccggccaagccgcgcagttcatggccatcgcgacgctcgcacactcgggcgacaacattgtgtctacctccaacctgtacggcggcacctacaaccagttcaaggtcctcttctcgcgcttcggcatcagaacaaggttcgtcaacggcgacagccccgaggacatcaaggcggccatcgacgacaagaccaaggccgtctacattgagagcattggcaacccgcgctacaacgtgcccgacttcgaggccattgccaaggtcgcccacgacgcgggcgtaccgcttgtggtcgacaacaccttcggtgccggcggctactttgtgcgcccgatcgagcacggcgccgacattgtggtgcactcggcgaccaagtggatcggcgggcacggcaccaccgtggcgggcgtcatcgtcgacagcggcaagttcgactggggcaagcacgccaagcggttcccgcagatggtcgagccgtcggagggctaccacgggctcaagttctgggacacgttcggcccaatcaccttcgccatccgcgcgcgcgtcgagatcctgcgcgacctgggcgcctgcctgaaccccttcgccgcccagcagctgctgctcggcatcgagacgctgtcgctgcgcgccgagaggcacgcccagaacgcgctggccctggcgcgctatctcgagaagagcgagtacgtctcgtgggtgtcttacccggggctcgagagccaccagtcgcacgagacggccaagaagtacctcaagcgcggcttcggcggcgtgctgagcttcggcgtcaagggtggcggcgcggccggtagccagatcgtcgacggcttcaagctcatctccaacctggccaacgtcggcgactccaagacgctggccatccacccctggaccacgacccacgagcagctcaccgacgaggagaagatcagctcgggcgtcaccgaggacctcatccggatctcggtcggcacggagcacattgacgacctcattgccgactttgagcagtcgttcaaggcggccgcggcggcgacgacgcagggcgacggcggcgccgtggccgacaggaccaagtccgagcaggcgccaactgttgtttaa

SEQ ID NO: 4515 - protein, 453 aa, Myceliophthora thermophilia
MAAPHKFETLQLHAGHEPDTATNSRAVPIYATTSYVFNDSAHGARLFGLKEFGNIYSRIMNPTVDVFEKRIAALEGGIAAVAASSGQAAQFMAIATLAHSGDNIVSTSNLYGGTYNQFKVLFSRFGIRTRFVNGDSPEDIKAAIDDKTKAVYIESIGNPRYNVPDFEAIAKVAHDAGVPLVVDNTFGAGGYFVRPIEHGADIVVHSATKWIGGHGTTVAGVIVDSGKFDWGKHAKRFPQMVEPSEGYHGLKFWDTFGPITFAIRARVEILRDLGACLNPFAAQQLLLGIETLSLRAERHAQNALALARYLEKSEYVSWVSYPGLESHQSHETAKKYLKRGFGGVLSFGVKGGGAAGSQIVDGFKLISNLANVGDSKTLAIHPWTTTHEQLTDEEKISSGVTEDLIRISVGTEHIDDLIADFEQSFKAAAAATTQGDGGAVADRTKSEQAPTVV

SEQ ID NO: 4516 - DNA, 546 bp, Myceliophthora thermophilia
atggcctctgttagcccacaaacgcggctacaacagccatctcaatcaaccctcagccagacccagaccgcgcagtccacaaaccagcaaacccagacccaaccgcaagccatcctccgtctgcgcggcgcacacgcaccgacgaggagatcggtacaatggcggtccgatgtggtggacaatgagggattagggaggaagaagtctaaagtctgctgcatctaccatcgcccgcgcggcgtggacgagtccagcgactcttcctcctcgtccgactcgtccgactcgtccgactccgactccgactccgactccgacgtcgacagcgggagcgggaaaaaatcacgagaccgcgagcacgaccatgggcatgattgtgacggccactctcacttgcaccgaggaaggggtcatgggaagaggtcaaggagacggaagccaagcccgaatgcgtacgagaagatgccgaggtacgacaaaccgaggaaggatgggaacaatgacagcggaaaggggagaggggacgagaggccacaggggccgtag

SEQ ID NO: 4517 - protein, 181 aa, Myceliophthora thermophilia
MASVSPQTRLQQPSQSTLSQTQTAQSTNQQTQTQPQAILRLRGAHAPTRRSVQWRSDVVDNEGLGRKKSKVCCIYHRPRGVDESSDSSSSSDSSDSSDSDSDSDSDVDSGSGKKSRDREHDHGHDCDGHSHLHRGRGHGKRSRRRKPSPNAYEKMPRYDKPRKDGNNDSGKGRGDERPQGP

SEQ ID NO: 4518 - DNA, 3498 bp, Myceliophthora thermophilia
atggacaactcctccgcgccgctcgccgactacttctggattgccgggatagagcatattacctacgatgatcctctaccccagcaaccccagcagctggatgatacgattgctgaggatggtgagggagagaataacgagagcccggtaacgaccccgtcgcgtgccacggctcggcattctcgccagaattcggccaatcgcatttccaccctgtccaagctctcgctgtcgccctcgatctccggcgagggccgcgtgttggaagacatcgatggccacactaggagcaaccggagcagcgcaaccatccggccgatacctccgccgaatctcggagacgaaaacaccaacgagaatggcagtaccggtgtcaacggctccggcgggggagaggggatcgggttcgacggcttcccgaccgacttcgactttgaccaggctctcctcaagttcgccgcggagcgggaagacttcctagatgatctcacattcagcgccggcgcaaaaatccacacgagaccaccgatggtcaacccgagaaccgagaagctgaaggccgacgacgccgacgcgagcggaaggaagagccccctccgcagcatccggggcagcatccgaggcagcatccgccgcaagatgagttttagggacatgagcagcgtgaggaagcaacccatgcctccgagagcggcttcggttcgcacggctaggcgcctgagcaattacaactcggtcatccctccgcccgagcccctgaacctggaccccgacatgcacccgctcaagaggcgcttcgaaccggtcctgctcgataggtatccccaacgggatgcttcggcggaggagctggccaggaggggcaagttcccggactacgtacccatgtttgccttccccaacgacatccagatcgtgtcctcggacgagcgcccgcggtcgacatggcacgggttcaccatgacctcggacgacaactccaagatttacggcatcaccatcattgtctggacagcattgaacgccgaggtggccgaggaggtagagaagcggtgcgagcggtggcggcaacggcacatgagcaacgaggaaagggagctcgctgccagtctgggcggtcgcctcgccgcggaacgggcgcatctctcccagctcctggctcaactgggcaccctgccctcgggatcggcggctagggaagccatcgacgaacagatcagcgccgtagaagagaagattgcgctgatgacggagatgttgcggccgctgagacacggcgcggcgtccaagatcgacggcctgacggccggcgagacgggtctctggacaccgcgcgcgttcggcatcctcggcagagacccctccaagatgggcttctggaaggaatggctcagggcggtcgtcgttcccatgaccgacggcagtgtgttgcgggtagcgcccagctcccccaaggtcgggcgttggcaaccgctggagcgctacgtcgtcaacctttgcaccgaggccttcagcccactaagctccctgacccaggtggagctgagtgttcgcgagctgcgcctgtacgcccggaaggaggcggccaacgagattccgggatcgaggaccatcgatatctacgccctcttccggtgcctgtcgctggagaacatcgtgctccttttcgagtacgccatgtccgaggcccgcatcatcttcctctcgtcacacaccggcatgctgcatcttgcgtgccatgcgctcgccaaccttctctacccgctgaaatggtcgagcatctttatcccggtgctgccggcgcgtctcatttcggcgctcgaggcgccgtgcccttatattgtcggagtcgagagacggtacgagaagattgagctccctgaggacgactacgtcctcgttgatctcgacaaggacgtcatcgacgcgacggcgcaacctgtcagcttaccgcggcagcaccggcgcaagctcttgtccttgctgcaggtagctgcgcctcaccgtctgcggtatggagttgcccccgggccccctccgtatgcgattgaagccttcccgtacgatgcgttctcggccgagagcgaggcgatcttcaacccggttccggtcaagagcacgctaggtaaatgggtgacccagaactcgtccacgtttgccgaaccggacccgcccaatacgatccgcacccctctgttcaacgcctttgcaaaggcgaaggtcgacccgagcaagccagaaaggccgacaacttccaagtcgagcaagggcagccccccctcttctgtgtcgcccgtctcgatgaacttcccgccgatgcccacgacccctgtgtcgcgcagcgactctggattcgcccagactctcagggagaagaggtccgggcacttcgacgagaaatctaggcgcagctcgtcgttcggcatggacaagcaccacccaccaatgcacaggcccagccttccgttcctcaacggccacagtcagaacctgtcgatctcggccatctcggttgactctcagtcctcgttcgggggctatgcgccttcgacgtatgcccagtcgaccattgccgcgtcgaccatcatgcccaacatgatggtccaaccggttcggaacacagagaataccgtctgggtggaaggccactgcttcaactgggcggcggccgaggttaactcgaactgcaccatctgcgaagagcgctcggaaggagacggcctcttcaagtgcagcggttgcggctgcctgtcccataaccggtgcctgggtttcgtgtcactggtatgccccgcggctttccatgcagaccgcgtgcgggcagcatttgtccgctgcctggctagccttctgtatacctaccgcaagcacctcggccggccgagtcgcgagcagaaggccaacggtcagctgtacgcctttgatatggacggattcatccgcagcctgccctacgaccagcaggagtacgcgacgatgatgcgggacacccaagctttcaacgagttcatccacgagcgcgaacggaaccccgccagcgacccagcgatccgcctctttgacgagatcattctcgccaagaaggcccgtggtcgcccggccttctcggcaggcttctcccgcctctccaccttacgcgcctctcacggcttctacccgggctccagcagctcctccgggggaggaggaggaggcggcttcaccgcgcccagtgccgcggccgcggggcgcgccgccaaggcacccgggtacctgaccgacacgtcggaccacatctggcgcacggcgtcggtgcccgtgccgtcggccaagttccagggcgactacaagagcatcgtgacgcgcgtgccgctgcgcctcgaaccggcgctgatgagggagcccagggcgatccagggcgtgcccaggccgtctgagcagggcaaggtgaagaagctggtgaggaagcaggtcgctagcatggtgggaccccccgcggggtttcgggctcaggagtga

SEQ ID NO: 4519 - protein, 1165 aa, Myceliophthora thermophilia
MDNSSAPLADYFWIAGIEHITYDDPLPQQPQQLDDTIAEDGEGENNESPVTTPSRATARHSRQNSANRISTLSKLSLSPSISGEGRVLEDIDGHTRSNRSSATIRPIPPPNLGDENTNENGSTGVNGSGGGEGIGFDGFPTDFDFDQALLKFAAEREDFLDDLTFSAGAKIHTRPPMVNPRTEKLKADDADASGRKSPLRSIRGSIRGSIRRKMSFRDMSSVRKQPMPPRAASVRTARRLSNYNSVIPPPEPLNLDPDMHPLKRRFEPVLLDRYPQRDASAEELARRGKFPDYVPMFAFPNDIQIVSSDERPRSTWHGFTMTSDDNSKIYGITIIVWTALNAEVAEEVEKRCERWRQRHMSNEERELAASLGGRLAAERAHLSQLLAQLGTLPSGSAAREAIDEQISAVEEKIALMTEMLRPLRHGAASKIDGLTAGETGLWTPRAFGILGRDPSKMGFWKEWLRAVVVPMTDGSVLRVAPSSPKVGRWQPLERYVVNLCTEAFSPLSSLTQVELSVRELRLYARKEAANEIPGSRTIDIYALFRCLSLENIVLLFEYAMSEARIIFLSSHTGMLHLACHALANLLYPLKWSSIFIPVLPARLISALEAPCPYIVGVERRYEKIELPEDDYVLVDLDKDVIDATAQPVSLPRQHRRKLLSLLQVAAPHRLRYGVAPGPPPYAIEAFPYDAFSAESEAIFNPVPVKSTLGKWVTQNSSTFAEPDPPNTIRTPLFNAFAKAKVDPSKPERPTTSKSSKGSPPSSVSPVSMNFPPMPTTPVSRSDSGFAQTLREKRSGHFDEKSRRSSSFGMDKHHPPMHRPSLPFLNGHSQNLSISAISVDSQSSFGGYAPSTYAQSTIAASTIMPNMMVQPVRNTENTVWVEGHCFNWAAAEVNSNCTICEERSEGDGLFKCSGCGCLSHNRCLGFVSLVCPAAFHADRVRAAFVRCLASLLYTYRKHLGRPSREQKANGQLYAFDMDGFIRSLPYDQQEYATMMRDTQAFNEFIHERERNPASDPAIRLFDEIILAKKARGRPAFSAGFSRLSTLRASHGFYPGSSSSSGGGGGGGFTAPSAAAAGRAAKAPGYLTDTSDHIWRTASVPVPSAKFQGDYKSIVTRVPLRLEPALMREPRAIQGVPRPSEQGKVKKLVRKQVASMVGPPAGFRAQE

SEQ ID NO: 4520 - DNA, 4137 bp, Myceliophthora thermophilia
atgcgcgccgtcctgccgggcaggcccgagtcgcgcctccaggcgctggcgacgggctgctggaatgggaggcgaattacggcttacatcaccggcaacgccctcgttattctgggcgcgcccaacgaactgctccagacggtctacgacgaggatcccgagccgttgcaggcaatcgcgttagacgaggcgtccggaaagatcgcagtgtgcacgcggcacgtggtgagggtgtaccggcccttgggagcgggcaggggcgaggtggatgcgctgttgcagtgggctttgcagacgagctttcccgtcggcgatgagggagaagaggagagcgggggagccgaggtgggcgaggaccgtccgcggccggcggtgtccctctcctggggcgcgtccgaggagctgctcgtggcccactccagcctcgagctataccagacctcgtcgaacctggcgactcccgagtgctcctggcggaagaggcttgccaaccccgtccggcgggctagtctgtcgtacgactcagcgtacattgcctcggtgggggagtatgaccggctggtcaaggtctggcggaggctaagttacggaactggcgaggtcaggttcgatttcctctacctgaggcatccgcagcccgtgacggggatccaatggcggcgaccccatcacgtcggccagaccatcgagaatgcgctgtatacgttctgcgcggataacgtgttgcgggtctgggcaggctcggacggctatgggcatcagcacctgcagctgtgggggactctcgacctgagggacgctatcccacccgcaaagggacctgggtctcccacatcggataacagtctgcgctgggcattcgtcatgcatggtggcgacctgtcggccgcgaccgagaaggctgtccaagaggggacgaagacgaaggacgaggccgccgcgctggagcagctcatcaaggttgcaaaccggagtccggagatttgcgtcgttctggatggccggggccgcatggcggcgtgggcactggagaatattgggggcaaaccgagcaagcccagcatcttcaacgtggcccaagtcgtctcttcggatcttgatttcttgaggggaagctcgcactcggagcttccacacgttgaggcgtacagctactgccagtctggagagcacttgcatctcctgctgcacttcttcgatgggaggattgaggtctatcgcagcaatatcgctgccttgttcgatcggaatccggagaggaagcggctggcccatagatgcgtatggacgggacattcggcaccaatacggaagatcgtacgcaacttcagcggcagggcgatcgtctcacggacggaaaatgggcagggagtgatctggaagcacaacccggccgccgagcggacgggcctcgcatgccaagcggtgatcccagagcgaggccatatccacaggatgtgcctgctccgaaacggtcggtttgtcgtcttcctcaagcacgaggatatctcgctctgggactgccggttctcgacaccagtactgctagccgagcagcgatatgaggtccctgggaagccgctctgcctgctggtccttcccaggcgaaaagtcgaggactacaccacagcgcatgtcgcgaccatcacgtcggagaagaaaggggtagtctgggaggtcaaatttccattttactcccgtacagatgcggccacccctcctcctataaacgggaccagtggaaccgagcagcaacagccctcgatccgtgagctcgtccgatttgcgctcgagggcgcgggggaccttgcctacgtcctccccgtcgatccagccggaaccgcgccgcacgtatccggcttcctcgacgtctttgctcgcgacgtggccatctcgtacacccacaccggacgggtcgagttctggaccgcccgcgtcggccacaacggcgacgaccgggttgaatggctgtcgaccagctcgatggagacaggcgtgtccaacccggctctcgtcagcggcagcacgcgcaagaaggcggcgctggtcaacgcctcgcggtcggcgctcaccatctgggacatcggcggcgcccggctcgagtacgcgcaggagtttgagaactcgcacacgatccgagacctggactggacgtcgacgccggacatgcagtcgatcctggccgtgggcttcccccaccgcgtgctactcctctcgcagatgcgcttcgactacctcaataaaggccccgcctgggccgcgatcctcgagatctcgatccgcgacttcacgccccaccccatcggcgactcggtctggctcggcgacggccacttggtgatcggtgccggcaatcagctgttcgtccaggaccgccgtttcgacgcggcgagctcgctcgtgaccagcctgaggctgccgcagcgtcgcgctggggagaagcactgggacctgttcaacgccgtgcagaggctgaacggcccgctgcccgtgtttcaccctcagtttctgagccagtgtatcctagcgggcaagatcgtgctcgtgcatgccattctgatggcgctgtatcggacgctgaagttctgggtcgagggcgacgagctggacgattacctggggatggcgctggaagacttttacgccgtcgatcacactaccaagacgtcgctaaacaaggatcccggacagtacctcgagcgacgcatgtcgtatgacgaaggagatgagccattttcggaggaggtcgcggctgagatcaacgagcggctcacgcacatcaacatcgcgcagttatcgggccacgagcagatccagctggtcaacatcatcgaatgcgtcggtctggtcgagaagcagcgacgctcgctcgatgagaacggcgcccggttcatgctcttcttccggcagcaggcgctgctcaagggccggacggacgagatccacctgggctggcgcgagatcaactgggcttatcactccacgagtcaggatgtgctggtagactttgtgtcgaggcagaatcaggggcggatgctctggaaggatgcgagggaaagcgggatattcatgtggttggcggataacgcagcggtgaaagcacaattcgaggtaatcgcgcgcaacgagtacaccaaaaacgagcccaagaacccgatcaactgcagcctctactacctcgcgctcaagaagaaggcgatcctgcagggcttatggcgcatggctgcgtggaaccccgagcagggcgcgacgcagcggttgctggcgaacaactttgacgaccccaagtggcggacggtggcgctcaagaacgcgtacgcgctgatgagcaagcggagatttgaatacgcggccgccttcttcctcctcgccgaccacctgcaggacgcggtcaacgtgtgcctgaagcagctcaaggacctgcagctcgccatcgcagtggctcgcgtctacgaaggcgataatgggccggtgctccggcgcctcctcgaggaggaagttctctcgatagctgcccaggagggcaaccgctggctggcctcgtgggcgttctggatgctccatcggagggacatggccgtgcgcgctctgattacgccggtatacacgctgctcgaaacgcccgggtcgccggacctcaagtcgcgactgttcctgacggacgatcctgcgctgatcatcttgtactcgcagctccggcaaaagacgctgcagacgcttcggggcgcgagcaaagtgacgcccaaggtggagtgggagtttgtcctgcatagcgcgaaactgtacgatcggatgggttgtgacttgttgggcttggatctggtccgcaactgggagttccttcagcccgcagggcctgtggccggtctgggcggcgaagtcaacccactcagactgctccggaggagggaatcgctggtcgtggccgatctccctattctgccgcaggtggcgagcgaggtatgcaatacacagcagcagcagcagcagcagcagcgacagcaacagcaacaacaaaatcagcagcacttgccggctgagatgaagtcgggcgggcacctgccgaagcagcaggcgcctccgacgatgtttgaggagccagatgcgaactcgttgttggatagctttggcttctaa

SEQ ID NO: 4521 - protein, 1378 aa, Myceliophthora thermophilia
MRAVLPGRPESRLQALATGCWNGRRITAYITGNALVILGAPNELLQTVYDEDPEPLQAIALDEASGKIAVCTRHVVRVYRPLGAGRGEVDALLQWALQTSFPVGDEGEEESGGAEVGEDRPRPAVSLSWGASEELLVAHSSLELYQTSSNLATPECSWRKRLANPVRRASLSYDSAYIASVGEYDRLVKVWRRLSYGTGEVRFDFLYLRHPQPVTGIQWRRPHHVGQTIENALYTFCADNVLRVWAGSDGYGHQHLQLWGTLDLRDAIPPAKGPGSPTSDNSLRWAFVMHGGDLSAATEKAVQEGTKTKDEAAALEQLIKVANRSPEICVVLDGRGRMAAWALENIGGKPSKPSIFNVAQVVSSDLDFLRGSSHSELPHVEAYSYCQSGEHLHLLLHFFDGRIEVYRSNIAALFDRNPERKRLAHRCVWTGHSAPIRKIVRNFSGRAIVSRTENGQGVIWKHNPAAERTGLACQAVIPERGHIHRMCLLRNGRFVVFLKHEDISLWDCRFSTPVLLAEQRYEVPGKPLCLLVLPRRKVEDYTTAHVATITSEKKGVVWEVKFPFYSRTDAATPPPINGTSGTEQQQPSIRELVRFALEGAGDLAYVLPVDPAGTAPHVSGFLDVFARDVAISYTHTGRVEFWTARVGHNGDDRVEWLSTSSMETGVSNPALVSGSTRKKAALVNASRSALTIWDIGGARLEYAQEFENSHTIRDLDWTSTPDMQSILAVGFPHRVLLLSQMRFDYLNKGPAWAAILEISIRDFTPHPIGDSVWLGDGHLVIGAGNQLFVQDRRFDAASSLVTSLRLPQRRAGEKHWDLFNAVQRLNGPLPVFHPQFLSQCILAGKIVLVHAILMALYRTLKFWVEGDELDDYLGMALEDFYAVDHTTKTSLNKDPGQYLERRMSYDEGDEPFSEEVAAEINERLTHINIAQLSGHEQIQLVNIIECVGLVEKQRRSLDENGARFMLFFRQQALLKGRTDEIHLGWREINWAYHSTSQDVLVDFVSRQNQGRMLWKDARESGIFMWLADNAAVKAQFEVIARNEYTKNEPKNPINCSLYYLALKKKAILQGLWRMAAWNPEQGATQRLLANNFDDPKWRTVALKNAYALMSKRRFEYAAAFFLLADHLQDAVNVCLKQLKDLQLAIAVARVYEGDNGPVLRRLLEEEVLSIAAQEGNRWLASWAFWMLHRRDMAVRALITPVYTLLETPGSPDLKSRLFLTDDPALIILYSQLRQKTLQTLRGASKVTPKVEWEFVLHSAKLYDRMGCDLLGLDLVRNWEFLQPAGPVAGLGGEVNPLRLLRRRESLVVADLPILPQVASEVCNTQQQQQQQQRQQQQQQNQQHLPAEMKSGGHLPKQQAPPTMFEEPDANSLLDSFGF

SEQ ID NO: 4522 - DNA, 234 bp, Myceliophthora thermophilia
atgttcggtacctacaaagaatacatgggagacatcttccttccctggacgtcgtttgaccgtgcaaccgccaccacgaagacaaaatgggaccactggctacgtcggaaggaactctcactacgccgagtcacgaggcaggagaaaacaggccgtggtcagaacaatcaacccccttctccaggctctggcccgcgcgcgtgggctgttatgtcaccgtcagtggcgtcataa

SEQ ID NO: 4523 - protein, 77 aa, Myceliophthora thermophilia
MFGTYKEYMGDIFLPWTSFDRATATTKTKWDHWLRRKELSLRRVTRQEKTGRGQNNQPPSPGSGPRAWAVMSPSVAS

SEQ ID NO: 4524 - DNA, 1170 bp, Myceliophthora thermophilia
atggccgacttcgacgacgaaatggacatcgacgtcgcaccctccaaagacatcacattttcctccgacaacacagccaaggggaagcgcagcgccgccaatctcccggtcgaggccgaagacagtctgccatgggtcgaaaagtatcgcccggcaacgctggccgacgtgtctggccaccaagacatcctcgcgactatcaacaagttcgtcgactcgaaccgactaccccatctcctgttctacggcccgcccggcacgggcaagacctcgaccatcctcgccctcgcacgtcgcatatacggtgccgagaacatgcgccaaatggtgctcgagctcaacgcctccgatgaccgcggcattgatgtcgtgcgcgaacagatcaagacctttgcctctaccaaacagatctttagcatgagcgcgtcggccacaaggtcagggattgccaatttcaagctcatcattctcgacgaagccgacgccatgaccaacacggcccagatggctctccgtcgaatcatggagaagtacacggcaaacacgcgcttctgcatcattgccaactactcccacaagctcagcccggccctgctctcgaggtgtactcgcttccgattcagcccgctcaaggagcaggatatccgtggtttgatagacaaggtcatcgaggaggagaacgtcaagatcatgcccgaggcgactgattcgctcgtgcggctgagcaagggcgacatgcgccgcgcattaaatgtgctgcaggcgtgccatgcgtcaagtacaccactccaacctcgcgagggccccaagattgccgagaaggatattgtccgcgagaccatcacaacagagactatttacaactgcgttgccgccccaccaccagacgccatcaagaagatcctcaacacgttactcagtactagcgatgtgacctcatgtctttccaccatcaacaccctaaaggtggcccagggcctggcactggctgacatcatcaccgcgctttcggaagaggtgatgaaattggaggtgaagccacaggttatgatcacctggttggacacgctcgcagagattgagcacagggtatcaagcggcgccaacgaagcgatacagacatcggctgtagtcggcgcgatacgaaacggcgtggagctgatgggctga

SEQ ID NO: 4525 - protein, 389 aa, Myceliophthora thermophilia
MADFDDEMDIDVAPSKDITFSSDNTAKGKRSAANLPVEAEDSLPWVEKYRPATLADVSGHQDILATINKFVDSNRLPHLLFYGPPGTGKTSTILALARRIYGAENMRQMVLELNASDDRGIDVVREQIKTFASTKQIFSMSASATRSGIANFKLIILDEADAMTNTAQMALRRIMEKYTANTRFCIIANYSHKLSPALLSRCTRFRFSPLKEQDIRGLIDKVIEEENVKIMPEATDSLVRLSKGDMRRALNVLQACHASSTPLQPREGPKIAEKDIVRETITTETIYNCVAAPPPDAIKKILNTLLSTSDVTSCLSTINTLKVAQGLALADIITALSEEVMKLEVKPQVMITWLDTLAEIEHRVSSGANEAIQTSAVVGAIRNGVELMG

SEQ ID NO: 4526 - DNA, 5139 bp, Myceliophthora thermophilia
atgtcgaccctcggaaactcgatatacactcaagccttcaattttggcagcttcaacaagaacggagtggatcctcgtaccggccaatacaccttttcgattcccatcttcgaaaccccatccgcggcacgcaactgcccccctctccggctctccatcaagtacaacccactgtatttgcgggagtttgggttgggccggggttgggcccttaacctgtctacctaccagcgtgtcgagcaaggaggaagagcgcgggccgcgttggtgctctcgaccggtgaacactaccgagtcacggaaacgccgagttcctgctccgtcgacgaccagaagctccgaagcttctccttcacaaagacctccagcactgtccagcacaacgaaattgtcgaagatgggatggccggtcgctactacaagatcgctcacaagtcaggcctggtcgagatcctgtctgacgacaatgggagatacaatactgccgttccggttaagatatatgcctccactgggcgctcattgaagttggtgtgggacaggcacggagaggagccccggctggtcaaaattcgagacggggatgacgacttacttagcctgcactataccagttcgctggtccaggtcaagcgaagtccggggacagccgagtccaacgttatctctctcacgctggacgacgatggcttgcttgcacatgtgtctttcccgatctcgcaagcaggagggcaggacctggagcgatatgcaacgccggcatgggccttcaagtacaaaacattcagcaacgacattacctgcctgaccaccgttgtcagtcctgccgggctcgtcgaggaggtgcaacaccgggaggatggtcaccgactgccaggcttctcccggttctcctacgagtacattccgtatgtcgtttcgcacattgtgaaacccggctgtggccggccacccaccgaaacgacctatagcttctcgacccgcaactttctcggctatggcggcagctctgtctggattgacgacgaggacaacctctatcgtatgcaggggggttacctgtacacatgcaccagcttcgtcaagggtggcccggagacacgatacacttacgacaaattccacctcttgacggaggtggcacagcggaaaggggacaagcatgtggtccaaagaatgtcgtaccacgatttattggctcaagggctcgattccttcgctgctcagccgccacagttccaactcccgtcgacaatccgaaccacgtatcaagacgcaagcaccgggcaatcgcgtgtcgagacggtccatcacgactttgacgagtggggaaatcccacccgggaggtcgatgcggacggcacggtaacctactcctcgttctacccggcatccggtcacaccgaccaagagagcggcgaggtctggtgcccggcagatccccacggcttcaagcgatacctctgggatgagaagaccataccatcgcgcggcgcggagccgtcgtcggaaccgccagtgcactgtgtttcgtaccggtaccagggaatccccaccgcaggcaccacttcctcgtccggcgagcatttcgtcgtcgcgcggcagtgtcgggtcctgcgaggtggcaaggccatctccatcacggacttttcatgtgttaaccagccagggagtagagatcacgggcgcccgagtaggaaggtcacgcatcttccttccgaagggcagcaccaggaggttgtcgactggtcgtataactacgacgcggaggaggggacggtgacggaacaggtgcgcgtcacaactggtggcggtggtaatcgtcccgtcacgggagaagccgagaccggcgcaagagaagagaagtcggcgttttccctctcttctgggttggttgtctcgcacgtcgacgctactggaattaccaatcacttccgctacgacagcctcggcaggctggcttctctaaccatcagtcggggaacaccgtacgaggcgactcgtcgcgttgttacagttaccgacgccgatggggtgacaacgcggacgttcacagacggactgggcagggtgtatcgggttgaacgccgggacgtcgacgacgacgacaacaacaacaacaataacaacgggagcagcgaaggtagccaaggaccgcaattccgagtcgttgaagagtacagctacgacgagctcggccagtgcgtgcgggccgacgaggtggattggctcagaagcccggtcgacggagaggggccgaggcagcagcgaaacagctgggagttcgggtacgacgactggggccatcaatacgaggccaggcacaatcatggtagccccatgtactggcacactgaccccatcgcgttgaccgcgtctgagacgatgaatcgaggcggaaaacatgaggtccggttcgatctcttgggcctccccgtgagtcggggactgcttgacgcacacggcacgaccattgacggggaggaatatacatacgacggcctgggccgcctcgtggcgcataaagacaaccacctcggccacacgacggagcttcggcacgacgactttgaccgagtggcccagatcatcaggccgggcggtcacactacccatgccgggtacgggccacacagttcggccattctgcccgcgtcgataaggatcgagggctacggccccgttgtcgagcagatctttgacggggcgggccggcttgtccggaggacggtgggcgggcgtaccaccggctacttgtaccggggcagcgagcctgagccggccgaggtgacccttccggacgggagcgtgctccgcctcacccacaacgccgcacttggatatgccctgacgagtgtggagagccgcgacggcgtggaccggtacgaatacgacaggcggacgcgggccatgacgcggcacgaaaacgcacactccgcagtcgacctccactacctcccttccgggttgctcgctggcgagacgactgtgatgaaaggcgcgacgtcggaggatggatgggagctcgtgctccccacaagatcgacatactcgatgggcggcaggttgcagcgatacgtggacatcaaccagcagccgcaggagatatcgtacgaccactgcggtcggcctcggcagctgactcagggcggcctcgtcgtcacgctcgaatacgacgacgcggatttcctggtccgcagccgggtcacggcccgtactcttcttgaaggccagagcgtgggcctgacgacatatctgcggtacgacgacatgggacgcgagatggagcggaccgtccttcgggacggaggggatgtcctctaccagctgagccaagaatacaaaggggcgcgacacctcgcggagcgcacactgcgagacggcgaaggcaccattctgcggtacgaaagttttaggtacgacagccactaccgcctcgtcggatacctctgccacgggtacctgtccccggccgccgacggagacgggcgctggcctctcgaggggcagaatttcgcctttgacagccacggaaatctggtagaagttatttccggcctcggagtgggcgcggggcaaaacaacaaggcgacgtacttctacgacgagcaggaccgcgcgcgcctcgtcgggatcgccaacacgcacccgaatcttccccccttcgtcagtctcgagtatgacgccaacggctgcctgacccgggacgaggagggccggaccctcgagtacgacgcgctcaaccgcctgcgcgccgtgagggaccggggcgggcgactgctgagccgctactactacgacgccacggggaagctgatctgccaggcggtgccggggcacccgaacatggtcttctcgtaccggaacgacaagctggtcgccgtcacccggggtgacctccaagtcagctatctgacatacgggtcgtcgtactggggctataacgtctcgcggggcgccgaggtgcagagctgtcggatctgggccgccgacttccacgagtcgcccttcgcctacgtggacacgcgcgacccgcgccgcgtttgcgacctcagctacacgccgtacgggctggccgtcggcgccaacgagcgctgggaatgcgcccatttccaggacatggacctcttcccgcgcatagggttcaacggggaatggcgggaccccgtgacggggtggtaccacctgggcaacggctgtcgcgtctacaaccccgtcctgatgcgcttccacacgcccgacacgtggagccccttcgccacgggcgagctcagcagctacgcctactgcgccggcgacccggtcaaccgcatcgaccccagcggccacctgagcatcttcgggtgggaggtgagcggccgcgacctggccataacgtgcgtcggcatcgccgtcggcgtgaccgtcggcgtcctgaccgccggcgccggcctcgccgtggccgtggccgcgagcgcggccgtcggcgccgtctcggacgtggcgaccggagccgtctacgactgggccagcgacggtaaggcgccgacgtgggagagcgtcggcagggacgctctgaacggcgccgtcggcggcgccgttggcgaggtggcagggaggggggcggtggccatgggcaaggccggcgcgagggcggtgaacaagacgctgggcaaggtcctcgcgggcgcatccaagctgcagagggcgtcctctgtgcctccgcgcatgggcttcaaggcgctcaaaatccgcatctcaaggctggaaagggttgcgtccgcaggcaatctgaatgaaatgggaagaaggcatctggcagacctgatagccaagcgcgacgcaatcctggctaggccagaatgggagtggatagaggatggaaataggttgataaaaacttgcaagctgccgcagctccagaggagcaatctcatgcagaagtactatgacttccgccattacgtacgtgaggagcgactccccgtacaagacgcggccagaatgttgggagacagtcacttggaggctctcaagggacatccgggccagtggacaatccggctaagccagaaacaccgagtcggattcctgatggacgaagcctcgcggaggatcgaggtgctgcagatcggggatcacttcactggcagggggtga

SEQ ID NO: 4527 - protein, 1712 aa, Myceliophthora thermophilia
MSTLGNSIYTQAFNFGSFNKNGVDPRTGQYTFSIPIFETPSAARNCPPLRLSIKYNPLYLREFGLGRGWALNLSTYQRVEQGGRARAALVLSTGEHYRVTETPSSCSVDDQKLRSFSFTKTSSTVQHNEIVEDGMAGRYYKIAHKSGLVEILSDDNGRYNTAVPVKIYASTGRSLKLVWDRHGEEPRLVKIRDGDDDLLSLHYTSSLVQVKRSPGTAESNVISLTLDDDGLLAHVSFPISQAGGQDLERYATPAWAFKYKTFSNDITCLTTVVSPAGLVEEVQHREDGHRLPGFSRFSYEYIPYVVSHIVKPGCGRPPTETTYSFSTRNFLGYGGSSVWIDDEDNLYRMQGGYLYTCTSFVKGGPETRYTYDKFHLLTEVAQRKGDKHVVQRMSYHDLLAQGLDSFAAQPPQFQLPSTIRTTYQDASTGQSRVETVHHDFDEWGNPTREVDADGTVTYSSFYPASGHTDQESGEVWCPADPHGFKRYLWDEKTIPSRGAEPSSEPPVHCVSYRYQGIPTAGTTSSSGEHFVVARQCRVLRGGKAISITDFSCVNQPGSRDHGRPSRKVTHLPSEGQHQEVVDWSYNYDAEEGTVTEQVRVTTGGGGNRPVTGEAETGAREEKSAFSLSSGLVVSHVDATGITNHFRYDSLGRLASLTISRGTPYEATRRVVTVTDADGVTTRTFTDGLGRVYRVERRDVDDDDNNNNNNNGSSEGSQGPQFRVVEEYSYDELGQCVRADEVDWLRSPVDGEGPRQQRNSWEFGYDDWGHQYEARHNHGSPMYWHTDPIALTASETMNRGGKHEVRFDLLGLPVSRGLLDAHGTTIDGEEYTYDGLGRLVAHKDNHLGHTTELRHDDFDRVAQIIRPGGHTTHAGYGPHSSAILPASIRIEGYGPVVEQIFDGAGRLVRRTVGGRTTGYLYRGSEPEPAEVTLPDGSVLRLTHNAALGYALTSVESRDGVDRYEYDRRTRAMTRHENAHSAVDLHYLPSGLLAGETTVMKGATSEDGWELVLPTRSTYSMGGRLQRYVDINQQPQEISYDHCGRPRQLTQGGLVVTLEYDDADFLVRSRVTARTLLEGQSVGLTTYLRYDDMGREMERTVLRDGGDVLYQLSQEYKGARHLAERTLRDGEGTILRYESFRYDSHYRLVGYLCHGYLSPAADGDGRWPLEGQNFAFDSHGNLVEVISGLGVGAGQNNKATYFYDEQDRARLVGIANTHPNLPPFVSLEYDANGCLTRDEEGRTLEYDALNRLRAVRDRGGRLLSRYYYDATGKLICQAVPGHPNMVFSYRNDKLVAVTRGDLQVSYLTYGSSYWGYNVSRGAEVQSCRIWAADFHESPFAYVDTRDPRRVCDLSYTPYGLAVGANERWECAHFQDMDLFPRIGFNGEWRDPVTGWYHLGNGCRVYNPVLMRFHTPDTWSPFATGELSSYAYCAGDPVNRIDPSGHLSIFGWEVSGRDLAITCVGIAVGVTVGVLTAGAGLAVAVAASAAVGAVSDVATGAVYDWASDGKAPTWESVGRDALNGAVGGAVGEVAGRGAVAMGKAGARAVNKTLGKVLAGASKLQRASSVPPRMGFKALKIRISRLERVASAGNLNEMGRRHLADLIAKRDAILARPEWEWIEDGNRLIKTCKLPQLQRSNLMQKYYDFRHYVREERLPVQDAARMLGDSHLEALKGHPGQWTIRLSQKHRVGFLMDEASRRIEVLQIGDHFTGRG

SEQ ID NO: 4528 - DNA, 1488 bp, Myceliophthora thermophilia
atggctaccgctgtctcggaagatgtggctatacacgaaggtaccgcgccgagcgacgaccgggacgcccacaacgactccgagaaagtggtgccgctcgaggatgccgtcgacgaggaatcgggtacgcgctcgccgcagtcgggccagcagctccagcgatggaacgaccctgccgtgaacatcttccggtacttctctatcctctacagcttcattctcatgggcatgacagacggcgcactcggtgccctgctgccatacatcgagtcctactactccatcagctacacggtcgtctcgctcgtcttcctctcgcccttcgccggctacctcctggcggcgctgctcaacaaccagatccaccaccggctggggcaggtgggcgtcgccttcatggggcccgtgtcgcggctgatcggcatcgtcccgctcgtgttccaccctccctacccggcgctgcccgtcatcctgctcttcactggcttcggcaacggcatcgaggactcggcctggaacgcctgggtcggaaacatgcaccgcgccaacgagctgctcggcgtcctgcacggcggctacggcctcggcggcaccatcggccccctcatcgccaccgccatggtgaccaagggcggcctgccctggtacaccttctactacgtcatgatcggcctcgacggcctggtgctgttcctcatggtgccggccttctggcgggccacggccgaggtgcaccgcgccgccgtgcgagcggggtacgctggagaagacagcggcgacggccgaggcggcgagggcgaggagggcaagcgcaccacgacgcggacggtgctccggtcgcccgtggtgtggctggtagccctcttcctgctgggctacgtgggcgccgaggtgtcgctgggcgggtggatcaccacgttcatgctccgggtgcggcacgccgagccgttcctggccggcctgacgtccaccttcttctggctcggcctgacggtcgggagggtcgtgctgggcttcgtgacgggcaagatcggcgagaaggtggccatcgcggcgtacctgctgctctcggtgggcctgcagctcctgtactggctggtacccaacatcgccgcctcggtcacctttgttacctttctgggcttcttcctggggcccctcttccccgccgcggtggtggctgccaccaagctgctgccgaccagctaccacgtgtcggccatcgggttcgccgcggcgtttggcggcggcggcgccgccctgttccccttcgccgtcggggccatcgcgcagagcaagggcgtcgaggtgctgcagcccattgtgctggccatcctgctcttcatcctcttgatatggctgatgctgcccggcggactcaagacgggaggcttggagaacgcccgagacaacaacgaaagcgtcggcgatgggtttaggaaagccttcgcctggttgaaggagaggttacaaccaaagagggtctga

SEQ ID NO: 4529 - protein, 495 aa, Myceliophthora thermophilia
MATAVSEDVAIHEGTAPSDDRDAHNDSEKVVPLEDAVDEESGTRSPQSGQQLQRWNDPAVNIFRYFSILYSFILMGMTDGALGALLPYIESYYSISYTVVSLVFLSPFAGYLLAALLNNQIHHRLGQVGVAFMGPVSRLIGIVPLVFHPPYPALPVILLFTGFGNGIEDSAWNAWVGNMHRANELLGVLHGGYGLGGTIGPLIATAMVTKGGLPWYTFYYVMIGLDGLVLFLMVPAFWRATAEVHRAAVRAGYAGEDSGDGRGGEGEEGKRTTTRTVLRSPVVWLVALFLLGYVGAEVSLGGWITTFMLRVRHAEPFLAGLTSTFFWLGLTVGRVVLGFVTGKIGEKVAIAAYLLLSVGLQLLYWLVPNIAASVTFVTFLGFFLGPLFPAAVVAATKLLPTSYHVSAIGFAAAFGGGGAALFPFAVGAIAQSKGVEVLQPIVLAILLFILLIWLMLPGGLKTGGLENARDNNESVGDGFRKAFAWLKERLQPKRV

SEQ ID NO: 4530 - DNA, 1770 bp, Myceliophthora thermophilia
atggcctccctcccaccccggccggccacgcgaggcgacgacgaggcctctccgctcctctgctctccgtcgtcgagcatgttgtcggcggtctcgagcccggcgtccaccaccaccaccgcctcgtcctcctcgtcgctgcgctcggcgtcgtcgcgccggaggcggcaggcccgcctgcgccggagcctctcgctcgtgtcggcgctcctgtcggccctctgcgccggctccgtcaccatcttctccctctacggttccgtcctccagcagcgcctgcgctactcccagttcgaggtcaacggcctcgcctcggccgcctccgtcgccatgtacgcccccgtctccctgctggggtacctgtgcgaccgcgccggccccgccccgctctccctgctggccgccctcgccttcgggggcggctacgccggcgccgcggccgcctacgtgcgcgccgagagggtcgtggcaggccatggtggtggtgtcggtggaggtggtgacggcaacgacaacaacgacgacaacgacggcagcgcggcgcatcattggtacgcgctgatggtgctcgccttcgtcgccatcggcgtcggcacgtgtgccatgtacctgagcgccgtcgcgacgtgcgccaagaactttggcaggggcaagcacaggggcctggcggtggccctgcccatcgccgcgttcggcctgagcggcatgtggttgagccaggtggggagccggctgtttgccaaccggcagctcccgagcggcggcgccgagagcgaggtcgacgtgccgcgcttctttgtctttctggccgtgctgctcgtcgcggtcggcgtggcgggcgcgtttgggctccagattgtggacgaggaggacctgatcgaggaggcggtggaggaactcgagcgcagcgggatcctcgacgggagcgccatgctcaccccggggagggcggcagcagagattcgcggcaatgggtacggagcggtggcggagagggcggaccccttcgacgagctggaagatgtcaaggaccccgaagaggaggaggcccggctaaggaagcagtgggttctcaacgccgagacccgccgcttcctgacggaccacaccatgtggtgcttcgccctcggcttcttcttcatgatcggcccaggcgaggccttcatcaacaacatgggcaccgtcatcaagaccctctacccgccgaacccggccccgcgctacggtggcggcggcgcacccacctcggccgccacacacgtctccatcgtcggcgtgaccagtaccgccatgcgcctgcttaccggaaccctaaccgacctgctcgcgcccagccccggggccgggcacaaccacggcggccgcttctggatcgtgtcgggcctcgtcggcgccggctacggcgccgtcttcagcctcaccccgatcatcatcaccgtcatctggggcgtcgagaacttcgccaccaactggggcatcgtcgccatgttccccgccctcggcgcgaccctctggggggtcgtctattccgccgtataccaggccggcgcgcagaggcaggcctcgcccggtagagctggcggggttggtgctggtggtgatgctcgttccggggagggagacgacgacgacaacaacctctgttacggccgggagtgctacgcgcccgcgttctgggccatggccgccagcgtgtgggtcgcctgcgctctggtcttgtgggcctggaaggggaggaaagggtgggcgcagagggggattgtggtgtag

SEQ ID NO: 4531 - protein, 589 aa, Myceliophthora thermophilia
MASLPPRPATRGDDEASPLLCSPSSSMLSAVSSPASTTTTASSSSSLRSASSRRRRQARLRRSLSLVSALLSALCAGSVTIFSLYGSVLQQRLRYSQFEVNGLASAASVAMYAPVSLLGYLCDRAGPAPLSLLAALAFGGGYAGAAAAYVRAERVVAGHGGGVGGGGDGNDNNDDNDGSAAHHWYALMVLAFVAIGVGTCAMYLSAVATCAKNFGRGKHRGLAVALPIAAFGLSGMWLSQVGSRLFANRQLPSGGAESEVDVPRFFVFLAVLLVAVGVAGAFGLQIVDEEDLIEEAVEELERSGILDGSAMLTPGRAAAEIRGNGYGAVAERADPFDELEDVKDPEEEEARLRKQWVLNAETRRFLTDHTMWCFALGFFFMIGPGEAFINNMGTVIKTLYPPNPAPRYGGGGAPTSAATHVSIVGVTSTAMRLLTGTLTDLLAPSPGAGHNHGGRFWIVSGLVGAGYGAVFSLTPIIITVIWGVENFATNWGIVAMFPALGATLWGVVYSAVYQAGAQRQASPGRAGGVGAGGDARSGEGDDDDNNLCYGRECYAPAFWAMAASVWVACALVLWAWKGRKGWAQRGIVV

SEQ ID NO: 4532 - DNA, 540 bp, Myceliophthora thermophilia
atgcacaaaagtgggtccgcgttcacagagcaaccacacatggagtcccaaacactcaagaaggctgagaagccgaagttgtttgatggaaaaacttcgtactcagtcagccggcagaaaaagcccatcacaaacttccagcgatgcagcaaccgcagcccttgtccgctgccgagacgccggtcgcaggcggctctcttcaagcaggtaacgaaaaccgctacagcagccgacacttctggtctcagggacggaaaggagggcatgtcggaatttcttgtcgagccgccgtcgcccaacttcggttcgagtttctgcgattcttacgaagaagcacaagcgctccgtagatactgggccaagagcaacaatagggagaccagttgtgcagtcgaatgccaggctggcggtgacgaaaacatgaaggacgaagacagcgacgaatatgtctgggatgatgctgcggaagatgacgagcaaattaaggaaaggcttgaagaagcccgactgaataccatcaaaaacaacttggagaaatga

SEQ ID NO: 4533 - protein, 179 aa, Myceliophthora thermophilia
MHKSGSAFTEQPHMESQTLKKAEKPKLFDGKTSYSVSRQKKPITNFQRCSNRSPCPLPRRRSQAALFKQVTKTATAADTSGLRDGKEGMSEFLVEPPSPNFGSSFCDSYEEAQALRRYWAKSNNRETSCAVECQAGGDENMKDEDSDEYVWDDAAEDDEQIKERLEEARLNTIKNNLEK

SEQ ID NO: 4534 - DNA, 333 bp, Myceliophthora thermophilia
atgaccgtcacccacattgtgctcttccaattcaaggctgatgccaagccagaagctgttaaggcagttgtcgacaacttcctgtcactgaaagacaactgcattcacccgacgagcaaaacgccctacatcctctcgctcaagtgcggaaaggacaactcgcctgagggcctgcagaatggaatgacgcacggtttcgtcgttgagttcgcgtccgctgaggatggggattactatgtgaccacagacccggttcaccaaaacttggtcaagagtctcggggatgtgcttgagaagccaattgttctagacttctccgatggagtgtactag

SEQ ID NO: 4535 - protein, 110 aa, Myceliophthora thermophilia
MTVTHIVLFQFKADAKPEAVKAVVDNFLSLKDNCIHPTSKTPYILSLKCGKDNSPEGLQNGMTHGFVVEFASAEDGDYYVTTDPVHQNLVKSLGDVLEKPIVLDFSDGVY

SEQ ID NO: 4536 - DNA, 561 bp, Myceliophthora thermophilia
atggagccaaatgcttcagagagaattccgcagctcaaaaacatcgccccagccatctttgtgccactccaagacgacatcttcctggcagaaccgccgcgggaccgggccgagcgcctaaagaggatccttgagaccattgattaccagcgggagggcgtcaaggagaacctcctctacatgttcgaacgggagaagaagcgggttgtgcaacaggccgccgaactggagcaagcacaaggaccgtccgcaatcaagccgagtctagccccggctgaggtggacgaaattatcgccaatatggaggcgccggggtcgggtcgcatcgaagactacatgattcgagacgttcccagattagacagcagcaagccggtagctcccaacacgtcactccgggacaaaaccgtcacggaactgctcgccatgatcgaggcggcagtggcggatttggagggattcgagaggcacatggcaggcatcaagaactggtaccttgcatgtcttgagcaggagatggcgagactggatcaggccggaaagcgtcccgaggagaggtga

SEQ ID NO: 4537 - protein, 186 aa, Myceliophthora thermophilia
MEPNASERIPQLKNIAPAIFVPLQDDIFLAEPPRDRAERLKRILETIDYQREGVKENLLYMFEREKKRVVQQAAELEQAQGPSAIKPSLAPAEVDEIIANMEAPGSGRIEDYMIRDVPRLDSSKPVAPNTSLRDKTVTELLAMIEAAVADLEGFERHMAGIKNWYLACLEQEMARLDQAGKRPEER

SEQ ID NO: 4538 - DNA, 771 bp, Myceliophthora thermophilia
atggaggcaaacacgagtcaaggctcgggcgtgatcccggctcagccaggcgatagcgaggccgcattcaagagattcgacacgtacccgtgggtgcgagaccgctcattccttcaaggcctcatggctactctgggcccctctctcctgggcgccaccgacggcttcagccgccaaaaggccctgagcaccaccctacaagcccgcatctggtggtacaagtcccgcttcaacaccgacgtcgaccgcgcggcgtacgaggcctacagcgcttctcacccgtcctcgtgcccggactccgccatcctcgccaggctcgaagagatccggcagcgcatggcaggagagggcaccggcgccggcggagcgcccgggtcggcaacgtcgtcgtcgtcgtcgtcgtcgtcgtcatcatcatcatccgctgcgggcgccaaccagaacatccccgcctggcagctgaacgcccccaaggtcgacctgagcaagaaggccgacgacggggtcaaccacagcaacacgggcgacggcgcgccgtacccggagaacttccaggacctgatcgaggccgtgacgacgggcaagccgatccccgggatcaaggagatcccggatactgtcgtgcgaccgccgggagttaccccctttggcaggatgaaagcgcctcgcaagccgtgggagaaggacgtgccgtccgacacggtgggggtcgggagcgtgtttggggacgtggtcgacaaggagttccctcccctgcccagcgacgagtag

SEQ ID NO: 4539 - protein, 256 aa, Myceliophthora thermophilia
MEANTSQGSGVIPAQPGDSEAAFKRFDTYPWVRDRSFLQGLMATLGPSLLGATDGFSRQKALSTTLQARIWWYKSRFNTDVDRAAYEAYSASHPSSCPDSAILARLEEIRQRMAGEGTGAGGAPGSATSSSSSSSSSSSSSAAGANQNIPAWQLNAPKVDLSKKADDGVNHSNTGDGAPYPENFQDLIEAVTTGKPIPGIKEIPDTVVRPPGVTPFGRMKAPRKPWEKDVPSDTVGVGSVFGDVVDKEFPPLPSDE

SEQ ID NO: 4540 - DNA, 2004 bp, Myceliophthora thermophilia
atggctcaagacgctgccaaggcccccgtggtggccgaggctcatgaagtcgacacctaccatcccccgaagaagatgctcgagaagcacccaagcaagcctcatctgagcggtctcgaggaataccagcggctgtacaaggagtccatcacagagcccgacaagttctgggggagactggcccgcgagctgctcacctggcacaaggatttccagacggtgaggagcggctctctcgtcaacggtgacgtcgcttggttcctcgagggcgagatcaacgcctcgtacaactgcatcgatcgccatgccttcaaggatcccaaccgcgtcgccatcatttacgaggccgacgagccgaccgatggccggaccgtgacctatggcgagctcctgcgcgaggtttcgcgcgtcgcctacgtcctcaagagcctgggcgtgcgcaagggcgacaccgtcgccatctacctgcccatgattcccgaggcggtcatcgccatcctcgcctgcgccaggatcggcgccgtccactcggttgtcttcgccggcttctcggcggactcgttgcgcgaccgcgtcctcgacgctcgctcgcgggtcgtcataaccgcggacgagggcaagcgtggcggaaagctgatcggcaccaagaagatcgtggacgacgccctccggcagtgccccgacgtcacgggcgtcctcgtcttcaagcgcaccggcgccgacatccccatgaccaagggccgcgatgtctggtggcacgaggaggtcgagaagtggcccgcgtacatggcgcccgagcgcatgagcgccgaggacccgctcttcctcctctacacatccggctcgaccggcaagcccaagggcatgatgcacacgaccggtggttacctcgtcggcgccgcggccacgggcaagtacgtcttcgacatccacgacggcgaccgcttcttctgcggcggcgacgtcggctggatcaccggtcatacctatgtcgtctacgcccccctgctcctcggcgtctcgacggtcgtcttcgagggcacgccggcctatcccaacttctcgcgttactgggacatcatcgagaagcacaaggtgacgcagttctacgtcgccccgaccgccctgcgcttgctcaagcgcgccggtgaccagcatgtgcgcaacgagatgaaacacctccgcgtgctcggctccgttggcgaacccatcgccgcagaggtctggaagtggtacttcgaagtggtcggcaaggaggagtcccagattgtcgacacatactggcaaaccgagaccggctcgcacgtcatcgctccgctggccggtgtgacgccgacgaagcccggctccgcctctctcccgttctttggcatcgagcccgccatcatcgaccccgtctcgggcgaggaaatccacggcaacgatgtcgagggcgtcttggccttcaagcagccgtggccaagcatggcccggaccgtctggggcgcccacaagcgttatatggagacgtacctcaatgtttacaagggctactatttcaccggtgatggtgccggccgggatcacgagggcttctactggatccggggccgtgtcgacgacgtcgtgaacgtcagcggccaccgtctgtcgaccgccgagatcgaagctgccctcattgagcacgccgccgttgccgaggccgctgtcgtcggcgtcgcggacgagctcacgggccaggctgtcaacgctttcgtctccatcaaggacggcaacgagccgtctgatgctctccgcaaggagttcatccttcaggtccgcaggagcatcgggccgttcgcagctcccaaggctgtgtacatcgtccccgacttgcccaagacgcgcagcggcaagatcatgaggcgcattctgaggaagattctcgctggcgaggaggaccaactcggcgacattaccacgctctcggatccttctgtcgtcgagaagatcatcaacgctgtccacgaggccaagaagaaataa

SEQ ID NO: 4541 - protein, 667 aa, Myceliophthora thermophilia
MAQDAAKAPVVAEAHEVDTYHPPKKMLEKHPSKPHLSGLEEYQRLYKESITEPDKFWGRLARELLTWHKDFQTVRSGSLVNGDVAWFLEGEINASYNCIDRHAFKDPNRVAIIYEADEPTDGRTVTYGELLREVSRVAYVLKSLGVRKGDTVAIYLPMIPEAVIAILACARIGAVHSVVFAGFSADSLRDRVLDARSRVVITADEGKRGGKLIGTKKIVDDALRQCPDVTGVLVFKRTGADIPMTKGRDVWWHEEVEKWPAYMAPERMSAEDPLFLLYTSGSTGKPKGMMHTTGGYLVGAAATGKYVFDIHDGDRFFCGGDVGWITGHTYVVYAPLLLGVSTVVFEGTPAYPNFSRYWDIIEKHKVTQFYVAPTALRLLKRAGDQHVRNEMKHLRVLGSVGEPIAAEVWKWYFEVVGKEESQIVDTYWQTETGSHVIAPLAGVTPTKPGSASLPFFGIEPAIIDPVSGEEIHGNDVEGVLAFKQPWPSMARTVWGAHKRYMETYLNVYKGYYFTGDGAGRDHEGFYWIRGRVDDVVNVSGHRLSTAEIEAALIEHAAVAEAAVVGVADELTGQAVNAFVSIKDGNEPSDALRKEFILQVRRSIGPFAAPKAVYIVPDLPKTRSGKIMRRILRKILAGEEDQLGDITTLSDPSVVEKIINAVHEAKKK

SEQ ID NO: 4542 - DNA, 2157 bp, Myceliophthora thermophilia
atggcgccgtcgccatccaagccggtcgcgctgggcggcaccgccgcgcgcgcccgcaccatccgcaccatcgtcacgcagctcacgtccatgtatctgcgcaaccgcacccgcatctcccgcgccatctacatcaccctgtttgtcgctctcgtcaaccggatccgcaattccatcgccgatcagaaacgggcctcggcccgcgaggcagaggagcgctcccggagggccggcaccacttccatgacgggcgatgacgaagaagggagaaagaaaaaggtcgggctgaaccgcgagttcctccgctcgctgttgaggctcctccgcatcgtcgtgccggggtggcggtccaaggagacgcagtacctcatcagccacagcttcttcctggtcctgcgcaccctgatcagcctcaaggtcgcggccatggacggcgcgatcgtgaaggcgctgatcaagggaaacgggcgcgagttcctgatgcgcatcttgtggtggatgctgatcgccgtgcccgccactttcaccaactcgatgctggcataccaccagtcggagctctctctccgctaccgcacgcggttgaccgagtatattcacgacaagtacttgtctcagctgaccttctacggaatctcggccctggacgacaggattaagaacgccgaccagttgattgccgtggacgtcacaaaattctcaaacaacctggccgaactctacagcaaccttgcgaaaccaattctggatatgacaatttacaccatctcgctctcacgcgccgtcggcggcgagggcgtcgtcttcatgtcgctgctggtccagctctcggcaacagtgatgcgagcgttgacacccccgtttggcaaatacgtggccgacgaggcgaggctggagggcgagttccgcttccagcactcgaggttgatagaccacgccgaggaggtcgccctgtacgcgggccacgaggccgaaaaggacacgctcgacaagggctacttcaccctgattaagcatatcaattacctccttcggaagcgcttctaccacggcttcatggaggactacgtcgtcaagtacatctggggcgccctgggactgattctctgcagctttcccgtgttcttcaagctccccgggcaggtcgtctccagcatgggcgaccggacggagagcttcgtgaccaaccggcggatgctcctgggcgcctcggacgccttcggccgtctgatgttctcgtacaaggaaatcatggagctcgccggctacacctcgcgcgtctcgtccctcctcgacgtcatgcaggacgtgcaggccggcaagttctccaagaagctcgtctcgagctccgacacggaagcgaacgccgccgtgctcaggggccgtggcaagacctttgtcagcaacgacatccgattcgtcgatgtgcccatcatctcccccaatggcgatgttctcgttccggccctctccttctccctcaaacagggcgatcacctcctggtcgtcggccccaacggctgcggcaagtcctccctcttccgcatcctcggcggtctctggcccgtctacggcggcaccgtctacaagccgcccttccacgagatcttctacatcccgcagcgcccgtatctctcgagcggcaccctccgccagcagatcatctacccggacaacctcaccaccatgcgcaacaagggcgtcaccgacgcggacctggaggccatcatccgcaccctctccctcgatcacctcctcgacgtgtacccggataggtgggacgcccaggccgagtggaaagacgtcttgtcgggcggcgtgcagcagcgcatcgccatggcccggctgttctatcaccggccccgctacgccatcctggacgagtgcaccagcagcgtcacgctcgagaccgagaaggtcatgtacgacaccgccaaggatttgggcatcaccctgatgactgtcagccaccgccgcagcctgtggaagtaccacacacatatcctgcagtttgacggccagggacactacgtctttagcaagctagacgccgagaggcggctgaagctggaggacgagagggaagatctggaggtgctcctgaggggcgtgcccgagatcgagaggcgtgtgaaggagttggcgggtgaggattag

SEQ ID NO: 4543 - protein, 718 aa, Myceliophthora thermophilia
MAPSPSKPVALGGTAARARTIRTIVTQLTSMYLRNRTRISRAIYITLFVALVNRIRNSIADQKRASAREAEERSRRAGTTSMTGDDEEGRKKKVGLNREFLRSLLRLLRIVVPGWRSKETQYLISHSFFLVLRTLISLKVAAMDGAIVKALIKGNGREFLMRILWWMLIAVPATFTNSMLAYHQSELSLRYRTRLTEYIHDKYLSQLTFYGISALDDRIKNADQLIAVDVTKFSNNLAELYSNLAKPILDMTIYTISLSRAVGGEGVVFMSLLVQLSATVMRALTPPFGKYVADEARLEGEFRFQHSRLIDHAEEVALYAGHEAEKDTLDKGYFTLIKHINYLLRKRFYHGFMEDYVVKYIWGALGLILCSFPVFFKLPGQVVSSMGDRTESFVTNRRMLLGASDAFGRLMFSYKEIMELAGYTSRVSSLLDVMQDVQAGKFSKKLVSSSDTEANAAVLRGRGKTFVSNDIRFVDVPIISPNGDVLVPALSFSLKQGDHLLVVGPNGCGKSSLFRILGGLWPVYGGTVYKPPFHEIFYIPQRPYLSSGTLRQQIIYPDNLTTMRNKGVTDADLEAIIRTLSLDHLLDVYPDRWDAQAEWKDVLSGGVQQRIAMARLFYHRPRYAILDECTSSVTLETEKVMYDTAKDLGITLMTVSHRRSLWKYHTHILQFDGQGHYVFSKLDAERRLKLEDEREDLEVLLRGVPEIERRVKELAGED

SEQ ID NO: 4544 - DNA, 12252 bp, Myceliophthora thermophilia
atgggcaaaattacgaaaaccatgcagtccaaacaccgggagaacctcgtatgttccaactcggacttgcttctcattatgccggctgttaatgttgctaacccaccctctcagtctccctgggttaaggactacgttctcgccgcggcgtctactccgttgccgctcattcccaaaaaacttgacgagttcccgaccagatggccatttccgcgcggcgacctgtatcactggatcccactcctgaaccggttcgacagcatcctcgaggccttttgtgcgacatacaagctgcaggatggttttcagatgagagacttcgggtgcgatctgctcctgaatcaaggcgcgccggtggagtacgccgacgagcagccgttcagcaaggagcgactggtccagttaggttacaaggaggacggagaccgtcagctgattgtctccattctcacctttaccagagttctcctgcaacattgcggtaaccggagcatatacgccagcagtcctcatctgaacgatctcctcaactcaaccgacttgagcgtcatctatcacactctcgaggttggtctcgaacttgcgcagcgctaccaggcttcgatcaagcgtgtgggtacccccaatcggcaagtgagcagcgccctgctcgcgaaccattataacatcgatctcgagcgggtgcaatatcttgcacagcctttcgtgaaaactccactctcgccgggtccccggttttctgatcttccgccgacgacgccgggctcggcaagtaagagcaaggagaaggcgtccggccctagccatcggaatgcggcctcggtgtatgcaaatgatctttcagcgatcattgctcccggcccagcggacgatgcgcgatgggctggttggggggatgtcaagataacctactacccaaagaccgaaacctcaggatctactgcgtcagaagcccaacctgccgaggccggctcgacctcaatacctacaacacctactcctctgcggcgtggctccacgggcctttctcagacgccgcgctcgagtaagactcatggcgctgaagatagtccattgagtcggagccacagagtgagtggcgatgaccatcctgtttctgggcccaggttcttcgagttgcgccaagtgaaggtgcagtcgacttctatttatgaactcctcaagctctgtccctccgacatgcccaaagcttcgcgatacgagtttttaaaccggctgaggatatgcaaggcgctgttggggtcatcagaggatcggcagttggccttggccgtccgtcttctggcgatcaccaacctagcgtacattcaccccgaagcgacgtttgtcgagaaggtcttgaagcaggacaatgatgagccgcgtaggtaccagctggtataccaactcgccgagttgatccatccctcggccgatgggacccccgatacgcctttaaagctgcaggccattgcgctagcagctttggagtccattacggtcatgccaacaaagtaccctgaggtggtcgcagctctgaatgccaatgtcaatcacggtgtccttctatacgtcatcaggaaagccgtggctagcatgaaagacgactctgccgaggcggatgacgggaaggtgaccgatgccgaccattggcgcgcgagtctctttgccctgactcttcagatggccatggcctctcgaataggtcaagagatgtcatcggccggacttcttgagatcatggtcgagatactcaacattcgatccaggacagcgacccggaactacagtatggtgctcgcattcctggatacaatcatctacggattcaacggcgcgttcaccgtcttcagcaatgccggaggtctagatgccatctcgaacctcatcatcgacacggtcgctcgatcaaaggaggaggttgcggcgggacaggggatgaagccagagtttcactcgcatacggtggactatgagattccattctaccaccagcaagcgctcaagtggctgctcaagttcatccatcacatcatgaccaatgccttctcttttggtaccaacatcgaccggctgctgaggaacctggtggacaactcagctctgctgggcagccttcgcaccattactgaaaacatgcatgtttttggttccttagtctggaccaacgcggcgggcttgttgagcgatttcatcaacaacgatccaactagcttcgccgccatatcggaatcgggtttgattcaaagctttctcgagaccctaactggcaggcctgtcactttgccgaagccttcagaaacacctaatcccgagcaagagggtgaggggcgcgactcgcctgctttcactaacgagtcggtcaacctggagagcgatgagcggccgcatcctccgactcaggaaatgctcgaagcgcctcgagagcgtcttgcgcctggcgttcttgcgtcgaccgatgccatcagcatcataccctcgatcttgaactccatctcgctgaacaacctcggtttgaagatggtcgactcgtcccacgcgatcgagatttacctggagattttcgagagcccgaaccatgtccaggttctgtcggaatcagatttggccaacgtggtcggcggaagttttgatgaacttgctcgccatcacccggcactgcggcctgccatctccaatgccatccttgacatggtggcccgagtcttgcaccttgcgaagacgaagtccatcagcgcagggtggggtgcgaagctttcggttcttgacgcaaacggaaaggccattaccgcagacgaatccttgctggcaagcttggaagcagcgcccagtacggccaaagggaaggagaaggccgctccagaagatgctgatgtcgagatggtcgacgcaagctccacggctgcgcagtctcatacctcccatggaaactccgctgctgaggaccaaaaaccttccggcccgtttcacgagataacaccttacatcggggcagtctcgtcattcctgaacgccatctttcacaattccagcctcaaatcaagtttcatccgcgatggcggtatcgagctgcttttgcagctgtcggaggttcctagcctgcccggagatttcgaaagcaccagcgcgtcgcgctcactcgcccacgcgcttgcaacggtgatcgaggcaagcccaattctaggtcttccatctttactcaaccgggcccacgccgccatcgatgatctggaaccgctcgtgagcaagaaaggcgcacagcccttcttcgctccctttgttgttcctaatctatcagtccagaacgatcaggccgaatgggatcaaggtttggtccgcaaagtggctggcggcacccgcgttgtgaaggctttggtcaggttgcaaactcttctcaagactctgtatcagagcttcccgtattcctctaggcaggcaacggtctcgatgccagcggtcaatgttttcgactacttcatctccctcatcaaccgtttgggaagcctccttcgtgacgccgcgacagaggacatggcaattgccgcccttgtgccgagccactggcttgggaaccgatcgttcactcaggatggtgtagaggtggttgcatcgccttccgctccaaccgctaccgaggaaagcaagccggaagatgccggtcaggctacttcggcggacaaggcagcagagccatcgaaactacccaaggagccgaccaaggaagaacgcgcctcgcctcgatttcagaactatttcgtgattagccgcctcctgaactcgttaacgccgagtacgctcccgttcttccagaccatagggaaagttctgttgtccaggcgtggccctgattgctacttgagatcccatcacttaagcattgcgcagacgctggcggagacgatcctcgagcagttgagtctgccacaggagcagagtctgacggttcgggacttacgatattgggatgtcatgttcgacgcactgaaccagatgctgatcgacccaacccggcagccggaccgcacttccgtccagctcatcctgcctgttttggtggcgttcaaagaccgtggtgggatagagctcctgaatactatgctccggaaattcgccgatgagctatgcaacgatgcgccggagcgccaggacgcccagaagctgcatctggttacagctgggatgagaaagattctcgacatataccacgtcatcgtcagcggcaagaacgtctacgagtctgtgggtcaaaccagcttgttcccgcggtcctcggacaggagcagagatcgggggcatcaactcattgtggagttgagattggctattttgccaaccgcccgaaagctatgggagtcagacttcgccgagaaggcgccgactcctgttctgagcagagtcatcgatatcatcaagacaattgcggctgccgatctggagacgaacgcatggcgcaagacggacaagaactcaccagtgcctctgttcggagatcggccgactatccggttcgactggcgtctttatgctgaccagatcaagaatctgacccggatggggtacgatgaggaactcgctcgcgaagctgtttaccgtgcgaacggaaaggtcgacgattcggcggagtattgtcgcgcccactccaaaggcctggctggcaagcgaaatcccgtccctgagcaggatgcataccgggggccgccatcaccccagtcgcaagcgactcgggacgaggcggtagcggctccggcgaatcctaccgcgacggatcccatgtctttggactcgatgaacaacttcattcgagacgcgattggcgaagccgaagaacattctgatgatggttctagtgatgaaagccatgatgacgagagtcgagaatccgagagtcaggaacaagctggtgcctcctcggccccgactcgggcccccatccccccttcaactccgtctgaaatttctccgacacctcctccgatcacgaaggatgagctcgacagggagagggcggaagttcaaaccgacttgattgatcgttgcttagatgtcgtcaggacgcacccggagctagtattcgaggtctgcgacctcatccaaacaacaatactcaagtccgataatgaggacaagcggaccgaagttggtgaagtccttgccaacgcgctcatgtcattcgctccgaacgatgccgacgagaagcgagcaaacggccgcgggattgcagctttcgcccatctgttgtcgcttcttctccaaaatcggtcattcttcaaaactacgctgccgaccctgaagcagaacgccggagaatacctcgggtttctgagagtttcaccagggagctcacatgaggagctcccgtcatggattccttacatcctccttatcttcgagattcttctctcggacgacgaacaaccggtagaagttgaatggagaatgcctgccaaagaggacgacgttgtcgagccgccagtttgggtcaccaaagatctcataatatccgccgaagaccgtaccaagctcctcaatgcaattctggacatcctcccaagaattggcaaggaggaggctttggcgatctccgttctgcggatactcgtgatcctgaccagagaccatgggatcgctaagattgttggagaaaagcgtaatttacagcggctctttgtcatggcgaagcagttgtgcagtgggggctcggctcggttgaaccaagcccatatcactgacaacatcatgatcatcctccggcatatagtggaggatgaggacatggttcgccaaatgatggagactgagatcaaacagtacttgtcttcgactcgaaatccgcggggctatcatgacctccaaagttacctgcggcatctgtctcatgtggcgctccgttcaccgaagctcttcgtcgacgtcacttcagaccttaccaagttgaacggttggtcaacttacgatccggccatccgtacgtacaatctatccctcaaggagaaacccgcagagcaggaaacgtctcctaaggaaggttctgtgggacccgctgtgcaagcgacagagggcttgactatcgaagatgtcaagccgtcaacagaaattgttgacaaggagatggcggatgcgccaaagaccccgttcgagctcaagcgacccgttctcgagaatcccgacggggtaatacacttcctacttagcgagttgttgaactacagggaggtcgatgacaaagagccgtcaagccattctccaaagggattgacagccgaaagcgaatcacccggtgcaagcggggaggcaacgcctgctcccgaccagcacctatccgagcagaaggaaaaggagcgaaaggcacccagaccgaccttcaaggcggaagatcacccaatttttgtctaccgctgctttctgctcaactgcttagcggaactgctgcagagttacaaccgcgcaaaggttgagtttatcaacttcaaacggagcgtgccaatccaaacgaacacgcctatcaagcctcgttcgagcgttcttaactatctgctcaacgatctcctttgcttgggacctgctggcattccgatggactcaaccatcattagaaagaaggctgccacctcgaatcacgcacaggcagtactcgtggccttggttgctagaacaccagagaaacccgtcgaccgcactcgcaattccttcgagtatgacgatgactcggaccttttgtttgtgcgccgatttgtgctcgaaaccgtgcttcgtgcctacaaggaggcctctacgcctggcgaaccggttgaggtgcgctatgggaagatgatgtgcgccgcggaactgatgagcttgatgattggcgagaaggacaaggaagcacagcagagggacgcccgtgcgagcgaccccgctgtcctccggtctcagatgcagctcaagcgcctcatgtatgagaaggggtatatcgccgccttgactgcgtccattgccgacatcgatctcacttttcccaacgtcaagcgcaccatcaagtatattctgcgtgttcttcgcgctttgacaaaaacggcctgcttgctgagccagtcggacgttattcccgtaacagcaactgatcagcctgaagacgacttcgcgtcggcgtcgtccctctcggacttggacgatgatcgtgaggagacccctgatctctaccgcaactccacgctcggcattctcgaacctgggcgtgaggaggatttctccgacgaggacgaagatgatgaccatgccatgttcgacgacgagccatatgacgatgaactcgaatatggcgacgaaatgtcccaggatgacgaagagaaccccagcgatgaggatgatgacgagctgggcgaaatgggtcaggtggaaggcatgccgggggaacctggcgttgtggaagtcattatgggtgaaaacgaagacatggacgatgatatggatgaggacatggacgaagatgacgaggaagagccctcggatgatgaggaggatgaggatgaggacgaggacgaggacgagatgggttccgaagacatggaggatatcgaagaccgcatcgagattgtcgacgaggaaggaaaccccgtggacgacgaaggagcgtctggttgggaaagcgaaaccgatgaagaggaagatgaagccgaggaggagctcggcttcgaagcaggtggcgcgcatgacattcacgacgcactcatgcatggacatggcatcgaccaactcggccacattcccgacattctacggaacgtcgtcgagggcggagatgaaattgatgcggaagatatgcaggagattgatgaacactacattgatgatggtgttgatgatgatggcaagtattcgctcccgggttttccgttgtgcgctcagctaactagaccagatgaggaagaggaagatgaaggtgaggaagatgaggtgtattacgaccctggtcaccatcatgacgatcacccacctcccacaatgccatcgggcctaggctgggatgtttcccagatcgagccccatcaccgtctacggcacggaggcaatcggagtcctttccctgcgccgttcatggccgggcaccaccgcgatcccttgggacccgattttcgtagctacttccgccacggccagcatcggcagcctccaaatccgaccgacgatggtgtcaaccctttgctgctctcgggtaaccgagctgggcaggatgcttctcgagtcactggccagcatatgataaggctgggcttcccgggttctttggtgggacatggtcttgatgcgcctcttgctttcatcaacgatctgatgcagagcatcccgttcccgcgcggcgccggtccctctttcagccttcagctccgatctgaaggcccggctggagaggttcgtcagctcagcattccggttagcatgacacagtctggccgcgagccccgctgggaaccacgccgcgaagtatatcaggagccccaccaagccgttacattcttccctgagtctaccgctgagaggtggcaaggagaggccaagatgatcttcggtttcaaccataacgagaaaaccaagttgctcgcgacggcaattttgggcatgctcacgccggctgccatccagcgggaaaaggaagccagggctcgacaggaggagaagcgcaagcgggaagaggaacgtaagaagcgtgaggaagaggaacgcaaggagcgagaggcgaaagaagccgaggagagagcggctcgggaaaggaaggaggccgaggagcgtgagcgtgaggaacgggaacgtgccgaggcggaggctgcacgcgccgcagaagaggccgttgccgttgaggaggtgtctgctcaagagccccaggcgatggaaggggtcgaaacccaccaagagacccaggaggccgcgccggaaccagctcgggcgagggaacgtgttgtcaccactatccgtggggagaccgtggatgtcaccgagcttggcatcgaccctgaataccttgccgcgctcccggaagaattcagggaagaagttattgctcagaccgtgagcagcaggcgctctcaggcgcgcgaacaggctgccaacgagggagagaacactgaagtcttccaggaatttctggaggcgctgccagcagaacttcgtatggagatcgttcagcaggaacgccaagaacggcgccgccgtgagcgcgaggaacagcgaagacatgctacggctacgggccaggacctcggccccgtcgaaatggataccgcaagcatcctgttgactttcccgccagccctgcgggagcaggttctgctagagcaaggcgaagacatcatggatcaattgcctcccgagctcgctgcagaggctcgcgctctcgctcaacgccaccatctccatcgggtcccaccaccagggagccgttccagggaagctgcacgtcgatctgaagcggcggctgaggcaaagccgcaacggcgcaccatcgtacagatgctcgacaaggcgggtgtcgctaccctcctccgactcatgttcatcacgcagcaaagctccatccgcaactacctgttcgatgtctttgcgcatgtctgcgagaaccgtcaaaaccgcctcgaggtcatttctacccttcttcaaattctccaggacggcagcaccgacatggatgctgttgaacgcagctttggccagttgtccttgaaggcaaagcagcccaaggacaaggaccccaagaccccgcagagcctcaagaggacatataccaatgctggtgccaataaccaaatgtccggcaattcggaggtctcgcctctgctgatcgttcagcagtgtcttgatctattgcaggagctcgcaacaaaaaaccctcacgtcccgtcccttttccttacagagcatgagactgtggcttcaacactcaagcgaagcacgagccgcaaaggcaagggcaaagacgtcagtaccaaggcccagaagtatgcgatcaactctcttctggccctcttggatcgagatctcatcatggagagttcttcggtcatgcagcttcttgcggatctgctcaacaaggtcacatatcctctgcaggctctcgagcgccggcgcaaggaagctgaagaggaagccaagaagaaggccgaggaaaaggaaaaggagaagacgggtgaggcaggtaccgagaccgcccagtcttcaggagaacaacctcctgcggcccagaccgccgagtcgactgctgtggctgcgactggagaacaacccccggcggaaaacatggagcagcccgaggcagagagctcaacagccagagaaccgaagaccgaggagaagaaagtccggcagctcgtcccgcccaccatccctgattacaacttgaagctggtcatcaacgtctttgttgcacgggaatgtagctccaagactttccagaacacaatttcgaccatcaagaacctctccaatattccgggcgcgaagaaggtctttggcgaagaactcgtctctcaggctagagccttgagcgagaacattgtgtctgaccttgaggatctgcttcctcatattctcaaagcggagacgggcaccgagattcaggggattgcgctcgctaaattctcccctggagcatctgagcagaacaagttgctgcgtgtcttgactgcacttgatcacttgtttgacactaagggcaagaaatcaagcggggtgggagaaggcggcgaagcaacagacgagacaaaggaggatcttctcagctcgctctactggaacccaacgtttgggaccatgtgggataagttgagtgcctgcttgagcgcaattcggcagcgggagagcttgctcaacgtcgcaacgatcctgttaccgctgatcgagtccttgatggtcatttgcaaaaacacgacgttgagcgaggcgtctgcttcgcaagtcgcgactgggaaggaaatgctcctgtcgagcccgccaccagacaaccgcatcgcaagcctgttcttcactttcacagaggaacatcggcgtattctcaatgagctggttcggcaaaaccccaagctcatgtcgggaaccttttctcttctggtcaagaaccccaaagttctcgagtttgacaacaagcggaactacttcaaccggagcgtgcatgcgaagaatggccagcagcggcagcagtatcagccgttgcaattgtcggtgcgccgagaccaggtcttccatgattcgttcaagtcactctacttcaagtcaggtccggagatgaagttcgggaagctcaatattcgcttccagggcgaggaaggtgttgatgccggcggtgttacgcgcgagtggttccaggtgctctcccgccagatgtttgaccccaactacgcgcttttcatcccggtatcgtcggaccgcacgacattccacccaaacaagctcagcggtgtcaatgacgagcacttgatgttcttcaagttcattgggcgcatcatcggcaaggctttgtacgagggccgagtccttgactgctacttcagtcgtgcggtctacaagcgcatcctcggcaagccggtttcggtcaaagacatggagtcgttcgatccagactactacaagtcgcttgtctggatgctcgagaacgacatcaccgacattatcactgaaaccttttcggttgaagacgacgagtttggcgtgactaaggtcgtggatctcattgagaatgggcgcaacattccggtcacagaggagaacaagcacgaatatgtccggctgatcgtggagcacaagcttctcacctcggtcaaggatcagatggagaacttcttgaaggggttccacgacatcatccccgaggaccttatctctatcttcaccgagcaagaacttgagttgctcatctctggtttgccggaaattgacgtcgacgactggaaagccaacaccgagtaccagaactatacgcctgcctctcaacaaattcagtggttctggcgcgcggtgcgatcttttgacaaggaggagcgggccaagctcttgcagttcgtgactgggacgtctaaggtgcctctgaatgggttcaaggaactggaaggcatgaacggcatcaaccggttcaatattcaccgtgactatggcaacaaggatcgcctccctagctctcatacatgcttcaaccagctcgatcttccggagtatgagagctacgaggttttgcgcagccagttgctcaaggccatcacggctgggagcgactattttggcttcgcctga

SEQ ID NO: 4545 - protein, 4083 aa, Myceliophthora thermophilia
MGKITKTMQSKHRENLVCSNSDLLLIMPAVNVANPPSQSPWVKDYVLAAASTPLPLIPKKLDEFPTRWPFPRGDLYHWIPLLNRFDSILEAFCATYKLQDGFQMRDFGCDLLLNQGAPVEYADEQPFSKERLVQLGYKEDGDRQLIVSILTFTRVLLQHCGNRSIYASSPHLNDLLNSTDLSVIYHTLEVGLELAQRYQASIKRVGTPNRQVSSALLANHYNIDLERVQYLAQPFVKTPLSPGPRFSDLPPTTPGSASKSKEKASGPSHRNAASVYANDLSAIIAPGPADDARWAGWGDVKITYYPKTETSGSTASEAQPAEAGSTSIPTTPTPLRRGSTGLSQTPRSSKTHGAEDSPLSRSHRVSGDDHPVSGPRFFELRQVKVQSTSIYELLKLCPSDMPKASRYEFLNRLRICKALLGSSEDRQLALAVRLLAITNLAYIHPEATFVEKVLKQDNDEPRRYQLVYQLAELIHPSADGTPDTPLKLQAIALAALESITVMPTKYPEVVAALNANVNHGVLLYVIRKAVASMKDDSAEADDGKVTDADHWRASLFALTLQMAMASRIGQEMSSAGLLEIMVEILNIRSRTATRNYSMVLAFLDTIIYGFNGAFTVFSNAGGLDAISNLIIDTVARSKEEVAAGQGMKPEFHSHTVDYEIPFYHQQALKWLLKFIHHIMTNAFSFGTNIDRLLRNLVDNSALLGSLRTITENMHVFGSLVWTNAAGLLSDFINNDPTSFAAISESGLIQSFLETLTGRPVTLPKPSETPNPEQEGEGRDSPAFTNESVNLESDERPHPPTQEMLEAPRERLAPGVLASTDAISIIPSILNSISLNNLGLKMVDSSHAIEIYLEIFESPNHVQVLSESDLANVVGGSFDELARHHPALRPAISNAILDMVARVLHLAKTKSISAGWGAKLSVLDANGKAITADESLLASLEAAPSTAKGKEKAAPEDADVEMVDASSTAAQSHTSHGNSAAEDQKPSGPFHEITPYIGAVSSFLNAIFHNSSLKSSFIRDGGIELLLQLSEVPSLPGDFESTSASRSLAHALATVIEASPILGLPSLLNRAHAAIDDLEPLVSKKGAQPFFAPFVVPNLSVQNDQAEWDQGLVRKVAGGTRVVKALVRLQTLLKTLYQSFPYSSRQATVSMPAVNVFDYFISLINRLGSLLRDAATEDMAIAALVPSHWLGNRSFTQDGVEVVASPSAPTATEESKPEDAGQATSADKAAEPSKLPKEPTKEERASPRFQNYFVISRLLNSLTPSTLPFFQTIGKVLLSRRGPDCYLRSHHLSIAQTLAETILEQLSLPQEQSLTVRDLRYWDVMFDALNQMLIDPTRQPDRTSVQLILPVLVAFKDRGGIELLNTMLRKFADELCNDAPERQDAQKLHLVTAGMRKILDIYHVIVSGKNVYESVGQTSLFPRSSDRSRDRGHQLIVELRLAILPTARKLWESDFAEKAPTPVLSRVIDIIKTIAAADLETNAWRKTDKNSPVPLFGDRPTIRFDWRLYADQIKNLTRMGYDEELAREAVYRANGKVDDSAEYCRAHSKGLAGKRNPVPEQDAYRGPPSPQSQATRDEAVAAPANPTATDPMSLDSMNNFIRDAIGEAEEHSDDGSSDESHDDESRESESQEQAGASSAPTRAPIPPSTPSEISPTPPPITKDELDRERAEVQTDLIDRCLDVVRTHPELVFEVCDLIQTTILKSDNEDKRTEVGEVLANALMSFAPNDADEKRANGRGIAAFAHLLSLLLQNRSFFKTTLPTLKQNAGEYLGFLRVSPGSSHEELPSWIPYILLIFEILLSDDEQPVEVEWRMPAKEDDVVEPPVWVTKDLIISAEDRTKLLNAILDILPRIGKEEALAISVLRILVILTRDHGIAKIVGEKRNLQRLFVMAKQLCSGGSARLNQAHITDNIMIILRHIVEDEDMVRQMMETEIKQYLSSTRNPRGYHDLQSYLRHLSHVALRSPKLFVDVTSDLTKLNGWSTYDPAIRTYNLSLKEKPAEQETSPKEGSVGPAVQATEGLTIEDVKPSTEIVDKEMADAPKTPFELKRPVLENPDGVIHFLLSELLNYREVDDKEPSSHSPKGLTAESESPGASGEATPAPDQHLSEQKEKERKAPRPTFKAEDHPIFVYRCFLLNCLAELLQSYNRAKVEFINFKRSVPIQTNTPIKPRSSVLNYLLNDLLCLGPAGIPMDSTIIRKKAATSNHAQAVLVALVARTPEKPVDRTRNSFEYDDDSDLLFVRRFVLETVLRAYKEASTPGEPVEVRYGKMMCAAELMSLMIGEKDKEAQQRDARASDPAVLRSQMQLKRLMYEKGYIAALTASIADIDLTFPNVKRTIKYILRVLRALTKTACLLSQSDVIPVTATDQPEDDFASASSLSDLDDDREETPDLYRNSTLGILEPGREEDFSDEDEDDDHAMFDDEPYDDELEYGDEMSQDDEENPSDEDDDELGEMGQVEGMPGEPGVVEVIMGENEDMDDDMDEDMDEDDEEEPSDDEEDEDEDEDEDEMGSEDMEDIEDRIEIVDEEGNPVDDEGASGWESETDEEEDEAEEELGFEAGGAHDIHDALMHGHGIDQLGHIPDILRNVVEGGDEIDAEDMQEIDEHYIDDGVDDDGKYSLPGFPLCAQLTRPDEEEEDEGEEDEVYYDPGHHHDDHPPPTMPSGLGWDVSQIEPHHRLRHGGNRSPFPAPFMAGHHRDPLGPDFRSYFRHGQHRQPPNPTDDGVNPLLLSGNRAGQDASRVTGQHMIRLGFPGSLVGHGLDAPLAFINDLMQSIPFPRGAGPSFSLQLRSEGPAGEVRQLSIPVSMTQSGREPRWEPRREVYQEPHQAVTFFPESTAERWQGEAKMIFGFNHNEKTKLLATAILGMLTPAAIQREKEARARQEEKRKREEERKKREEEERKEREAKEAEERAARERKEAEEREREERERAEAEAARAAEEAVAVEEVSAQEPQAMEGVETHQETQEAAPEPARARERVVTTIRGETVDVTELGIDPEYLAALPEEFREEVIAQTVSSRRSQAREQAANEGENTEVFQEFLEALPAELRMEIVQQERQERRRREREEQRRHATATGQDLGPVEMDTASILLTFPPALREQVLLEQGEDIMDQLPPELAAEARALAQRHHLHRVPPPGSRSREAARRSEAAAEAKPQRRTIVQMLDKAGVATLLRLMFITQQSSIRNYLFDVFAHVCENRQNRLEVISTLLQILQDGSTDMDAVERSFGQLSLKAKQPKDKDPKTPQSLKRTYTNAGANNQMSGNSEVSPLLIVQQCLDLLQELATKNPHVPSLFLTEHETVASTLKRSTSRKGKGKDVSTKAQKYAINSLLALLDRDLIMESSSVMQLLADLLNKVTYPLQALERRRKEAEEEAKKKAEEKEKEKTGEAGTETAQSSGEQPPAAQTAESTAVAATGEQPPAENMEQPEAESSTAREPKTEEKKVRQLVPPTIPDYNLKLVINVFVARECSSKTFQNTISTIKNLSNIPGAKKVFGEELVSQARALSENIVSDLEDLLPHILKAETGTEIQGIALAKFSPGASEQNKLLRVLTALDHLFDTKGKKSSGVGEGGEATDETKEDLLSSLYWNPTFGTMWDKLSACLSAIRQRESLLNVATILLPLIESLMVICKNTTLSEASASQVATGKEMLLSSPPPDNRIASLFFTFTEEHRRILNELVRQNPKLMSGTFSLLVKNPKVLEFDNKRNYFNRSVHAKNGQQRQQYQPLQLSVRRDQVFHDSFKSLYFKSGPEMKFGKLNIRFQGEEGVDAGGVTREWFQVLSRQMFDPNYALFIPVSSDRTTFHPNKLSGVNDEHLMFFKFIGRIIGKALYEGRVLDCYFSRAVYKRILGKPVSVKDMESFDPDYYKSLVWMLENDITDIITETFSVEDDEFGVTKVVDLIENGRNIPVTEENKHEYVRLIVEHKLLTSVKDQMENFLKGFHDIIPEDLISIFTEQELELLISGLPEIDVDDWKANTEYQNYTPASQQIQWFWRAVRSFDKEERAKLLQFVTGTSKVPLNGFKELEGMNGINRFNIHRDYGNKDRLPSSHTCFNQLDLPEYESYEVLRSQLLKAITAGSDYFGFA

SEQ ID NO: 4546 - DNA, 705 bp, Myceliophthora thermophilia
atggctcccatcaagccgcactgggtgcagccgtcgcaccccgacattcaggaggtcatcgttaacgaggccgccttcaccaccaagagcatctctaagatctccctccctccgtttggcctgtttgccaagctggagttccctccctgcaccatggcccccaagcccacgtacgcgacggtccagatggaccgtgacaagcactttgacctcaacagcgacctgctgtacatcaaccactcgtgcgagccgtctcttatctttgacacgtccagcatgaccgtcatcgccggaccaaaggggctgaagccgggcgacgagctgacattcttctatccctccaccgagtggtacatggcccagcccttcgactgcctctgcggcgctccgacctgtcgcggccgcatcgccggcgctcgcgacatgacgtccgcccagctcgagggcatgtggctgaaccggcacatccgcgacttgctcgaggagcgggacgccggcctcaaggcgaagcaggaggccaacggcaccgacggcaccaacggcactaacggcacggatggcaccgacggcaccggccgggttaacggcgtcgatgctgcgcccaaggctgaccccgctcccgcgcccgccggggcgcagcggcgcggcccgacgtcaagggaactgagcggcgagatgggtggggatacggcggtgcaagtctga

SEQ ID NO: 4547 - protein, 234 aa, Myceliophthora thermophilia
MAPIKPHWVQPSHPDIQEVIVNEAAFTTKSISKISLPPFGLFAKLEFPPCTMAPKPTYATVQMDRDKHFDLNSDLLYINHSCEPSLIFDTSSMTVIAGPKGLKPGDELTFFYPSTEWYMAQPFDCLCGAPTCRGRIAGARDMTSAQLEGMWLNRHIRDLLEERDAGLKAKQEANGTDGTNGTNGTDGTDGTGRVNGVDAAPKADPAPAPAGAQRRGPTSRELSGEMGGDTAVQV

SEQ ID NO: 4548 - DNA, 2826 bp, Myceliophthora thermophilia
atgtccacacaagtccgcaccttcacaccgccaaggtctcttggtgagaccctcaacgaagctcctctcgagctgtcctcctccacgccgcgctccgttcccgagctccccaggctatctaagcccgccatcgccccgtctctgaaggcgcctcacttcgccatgtcggacccctaccgcgacgaaaagcgcaagggtggagtcacgtatgcccaccaggacagccttccaaagctgcccatcccagatctcgagtccacctgcgagaagtacctggctgccctcaagccgctccagtctccgagggaacatgcagaaaccaagcgtgccgtcgagtcctttctgaaaaacgaagggcccgagctccaggagaagctcaagaagtatgccgaagcgaggacgagctacatcgagcagttctggtatgactcctatctcaactttgacaaccccgtcgtcctcaacctgaaccccttcttcctgctcgaggatgacccgacgccagcccggaacaaccaggtgacaagggctgcttcgctcatcgtctcggcccttgagtttgtgagggcggtccgcaaggaagagctgccgccagacacggtcaagggaaccaccctgtgcatgcaccagtactcgcgcctgttcggaaccgcccgcgttccgaccgacgccggctgccagatcgagcaggaccccgactccaagcacatcatcgtcatgtgccacggccagttctactggttcgacgtgctcgacgacaactcggacctcatcatgacggagcgcgacattgccgtcaacctgcagaccatcatcgacgacgctgcgcagacgcccatccaggaagccgccaagggcgccttgggcgtgctcagcaccgagaacaggaaggtctggtcgggtctaagggacgtcttgatgagggagcccggctccaacaatgccgactgcttgaattttgtcgacacggccctctttgtagtctgcctggactactcggaacccaccacggccgccgcgctctgccagaacatgctttgcggcaccagcgagatcgagaagggtgtccagatcggcacctgcaccaaccggtggtacgacaagctgcagatcatcgtctgcaagaacggaagcgccggcatcaactttgaacacaccggcgtcgacggccacacggtgctgcgcttcgccagcgacgtctacaccgacaccatcctccgctttgcgagaagcatcaacggcaaggccccgacgctgtgggcgtccaccagccccgacccgtccaagcgcgaccccgagagctttggcgatgtcagcaccacgccgcacaagctcgagtgggacatgactcccgagctccgcatcgccgtccgcttcgccgagacccggctggcggacctgatcgagcagaacgagttccagtgcctcgacttcaacgcctacgggaagaacttcatcaccgccatgggcttctcgcccgacgctttcgtgcagatggccttccaggcggcctactacggcctgtacggacgcgtcgagtgcacttacgagcccgccatgaccaagatgtacctgcacggccgcaccgaggccatccgcaccgtgtcagaagaatccgtcaactttgtccagaccttctgggccgacaacccggccgagaaaaagatcgaggccctccgcaaggcctgccaacgtcacgtcgccacgacccgggagtgcgccaaggcccaggggtgcgaccgtcacttgtacgctctcttctgcctctggcagcgcaccgtcgacggggacgccggcagttacctctccggaaccaacggctattccagcccgatcgacaatttctccgaccgcggcaccggcggcggcggcgacggcagcgtcagcagcagccctccgcgcgagcccgcataccttctcgacggctccaccgccaccaccgccaccaccaacaacaacaacgccattcattccacaagcatcaacggtaacgatgagagcagtcacccaacaaagccaacagcaacaacctcccgcgcacgaaacgacagcatccaatcgtctaccgggcgtacctcgccctccctggccacgtccaatcaactgcccgccatttttgccgacccgggctgggacaagctcaacaccaccatcctctccacgtccaattgcggcaacccctctctccgccagttcggcttcggtcccgtgtccggcgacggctttggcatcggctacatcatcaaggacgaaggcatctccatctgcgtctcgtcgcgccacaggcagacccgccgcttcgtcgacacactcgagagctacctgctcgagatccggcggattctgaggatcgccgccaactcggggtccgcaggcagggccggtcccggtgtgtgggcgaggggcgggccgacgagccgggcaagggaggtggaaggcctgcgggcaggctatggcaccaaggcggaggccggcaaggtcgccggcggtcagggcggtcagggaggcggtgctactgctgccagcagccatggtagcgctagtggcagcagggcgaggctgagggggcggctgatcacgagcggctccaaggccgggtcagaagggggcgtaaatgggagcatctcatcgcccacggatgaaagcctggccctaagcgaggatgatgagctgggtggctatggattcttcgacgcgggaatgcttctccaggcgctcaaggcgcggggagacaacaacagcggcgagtcgaagccatcggagcgcgcggcggtgcaggcgcggagacgcgggattgggaagaagctgaggttggtcgattactag

SEQ ID NO: 4549 - protein, 941 aa, Myceliophthora thermophilia
MSTQVRTFTPPRSLGETLNEAPLELSSSTPRSVPELPRLSKPAIAPSLKAPHFAMSDPYRDEKRKGGVTYAHQDSLPKLPIPDLESTCEKYLAALKPLQSPREHAETKRAVESFLKNEGPELQEKLKKYAEARTSYIEQFWYDSYLNFDNPVVLNLNPFFLLEDDPTPARNNQVTRAASLIVSALEFVRAVRKEELPPDTVKGTTLCMHQYSRLFGTARVPTDAGCQIEQDPDSKHIIVMCHGQFYWFDVLDDNSDLIMTERDIAVNLQTIIDDAAQTPIQEAAKGALGVLSTENRKVWSGLRDVLMREPGSNNADCLNFVDTALFVVCLDYSEPTTAAALCQNMLCGTSEIEKGVQIGTCTNRWYDKLQIIVCKNGSAGINFEHTGVDGHTVLRFASDVYTDTILRFARSINGKAPTLWASTSPDPSKRDPESFGDVSTTPHKLEWDMTPELRIAVRFAETRLADLIEQNEFQCLDFNAYGKNFITAMGFSPDAFVQMAFQAAYYGLYGRVECTYEPAMTKMYLHGRTEAIRTVSEESVNFVQTFWADNPAEKKIEALRKACQRHVATTRECAKAQGCDRHLYALFCLWQRTVDGDAGSYLSGTNGYSSPIDNFSDRGTGGGGDGSVSSSPPREPAYLLDGSTATTATTNNNNAIHSTSINGNDESSHPTKPTATTSRARNDSIQSSTGRTSPSLATSNQLPAIFADPGWDKLNTTILSTSNCGNPSLRQFGFGPVSGDGFGIGYIIKDEGISICVSSRHRQTRRFVDTLESYLLEIRRILRIAANSGSAGRAGPGVWARGGPTSRAREVEGLRAGYGTKAEAGKVAGGQGGQGGGATAASSHGSASGSRARLRGRLITSGSKAGSEGGVNGSISSPTDESLALSEDDELGGYGFFDAGMLLQALKARGDNNSGESKPSERAAVQARRRGIGKKLRLVDY

SEQ ID NO: 4550 - DNA, 3468 bp, Myceliophthora thermophilia
atgggtgcgatcgacgacggcttcgaggccttgctggagcctttttataacggcaagaagctcaccgacccgatatctaccaaggaagacaagtaccagctattgccggcgttcctcaaggtcaagggcctagtcaagcagcacatcgattcgtacaacttcttcgtcgaacacgagatcaaggacattgtcagggcgaaccgcatcatccggagtgaccaagaaaaagacttctggctcgagttcaccgacatccgcgtcggcacacctacccgcaatgactacagcgactttaaagctcgcgatgaggtcacccccatggagtgccgcctccgcgacatgacgtacgccgctccagtcgtcgtcgacattgtatactcgcgcgaccggaaaaagattgtccggaaggacattcccctctgccgcattcccgtcatgctcaagagcgcaaagtgctgcctgagcggcgccaccaatgcgcagatggagatcatgaacgagtgcccgctagaccccggcggctacttcatcatcaacgggacggagaaggtcatcctcattcaggagcagctcagcaagaaccgcgtcattgtcgaagcggacgagaagaccggcggcgtgtcggcctcggtcacgagttcgacccacgagcgcaagtccaagacgtacgtcatactcaagaaggaccgcatcgtcctcaatcacaacgtcctcgtcgagccgatcccgatcgtcatcgtcctcaaggccctcggtgggctttctgattacgagatcatggaactggtggcgggcggagatgcgcggtaccaggacgacttcctcatcaacttcgacgaggccaccaaggccggcgtgttcacgcagcaacaagcgctcgagtacgtgggttccagggtcaagatgggcggccccaagaaagggcggtccatggcggcaccccgtcgaagcccggtcgaggagggattggacgcgctcgcaaacgtcgtggtggcccacgtcgagattcaggacctcgacttctacccgaaagccatctacattgccatgatggtccggcgtgtcctcatggcttcgcacgaccccaagctggtcgatgaccgcgacttcgtcggaaacaagaggttggagttggccggacagttattgtctctgctctttgaggatatgttcaagatgttcgtcggaagcctgaagggtaacatggaatacttcttcaagaagcccaaccggacgtccgcttacgaccccgtgggtcccattagcagtcaggggcagtacatcactcagggcttgaaccgagccatccagagcgggaactggaacgtcaagcggttcaacatgaaccgggcgggagtcacacacgtcctcagcaggttgagctacatcgcggcgctgggcatgatgactcgcatcagcagtcagtttgagaagacgaggaaggtgagcggcccgagagccctccagccgtcgcagtggggtatgctctgtccgtccgacacgccagagggtgaagcctgcggtctggtgaagaacctggccctcatgacacacatcaccacgaacgcggaggaggagccggtcaagaactggatctttagcctcatccccggcgtcgagcccatccgaatgtttaccggaaccgagatgcacaggccggggtcctacatcatccacctcaacggtaccccgttcgccctcaccaggcacccgaagcagttcgcagcgcggttcaagacgatgcgtcgccgcggtcatatttccccttttgtcggcattcacatcaacgagcatttctcggcaatccatatcgccaccgacgaaggacgcatttgcaggccgtacatcatcgtaaaagacgggaagccgagactcaagaaggagcacttgagactcttgcagttgggcaaggcgacatttgacgactttttgaagaatagcgtcatagaatatctagacgtcaacgaggaaaacgatgccttgatcgccatcagggaggaagacgtcaaccagtcgacaacccacatggagatcgagccctttacgatcctcggcgcggttgccggcctcattccgttccctcaccacaaccaatctccccgtaatacctaccagtgcgccatgggtaagcaagccattggagccatcgcgtacaaccagttcaaccgcatcgacacccttctctacactctcgtctatcctcagcggcccatggtcatcaccaagacgatccagctcatccactacgacaagctcccggccggacagaacgcgacggttgtggtcatgtcgtactcgggctacgatatcgaagacgccctcgtcttgaacaaggcctcgtgcgacaggggctttgggcggtgccaagtattccgcaagtacacggccgagctgcaacagtaccccaacgggcggaaagacagactgggcggcatccagaaggacgaggagggccgtacgatcgccaagcacgcctgcttagacaaggacggcctcgccgtcgtgggctaccgggtgcactccggagagactatgatcatgaaggagacgccaatcgaccagacgtcgacgggcatcggcagcgaccgcgggtccgacgaattccgcccggccccgatcaactaccgcattcccgacccggcctacatcgacaaggtgatggtctccaacacggagaagaacacggcgatcatcaaggtgcagacgcgccagacccgccggccagagctcggcgacaagttctcttcccgccacggccagaaaggtgtcgtcggcatcattgtcgaccaggaagacatgcccttctccgactcgggtctcgtcccggacatcatcatgaacccgcacggtttcccgtcccgcatgacggtcggcaagctcttcgaatgcctgacgggcaaggcctcggtcgtggcgggcaggcgggactacggcttcggcgacgctttccgctcgcacccggtcgaggagatgggcagggtcctgatcgagcacggcttctcgtgggagggcaaggactacttcacgtccggcatcacgggcgagccgcacgaggcgtacctgttcaacgggcccatctactaccagcgcctgaagcacatggtgcaggacaagatgcactcgcgctcccgcgggccccgggccatcctcacgcggcagccgaccgagggtcgctcgcgcgacggcggcctccggctgggcgagatggagcgcgactgcctgatcgcctacggagcctcgcagctgctgctcgagcgcctgatgatcagctcggacgggacccaggtcgacatctgcgagcgctgcggcctgctgggctacaagggcttctgccagacctgcggcagcaccagccaggtgacgcagatgacgatgccctacgccgccaagctgctggtgcaggagctgatcagcatgaacgtcggcgtgcgcatgcagctggaggacaagtttccccatccgaggtag

SEQ ID NO: 4551 - protein, 1155 aa, Myceliophthora thermophilia
MGAIDDGFEALLEPFYNGKKLTDPISTKEDKYQLLPAFLKVKGLVKQHIDSYNFFVEHEIKDIVRANRIIRSDQEKDFWLEFTDIRVGTPTRNDYSDFKARDEVTPMECRLRDMTYAAPVVVDIVYSRDRKKIVRKDIPLCRIPVMLKSAKCCLSGATNAQMEIMNECPLDPGGYFIINGTEKVILIQEQLSKNRVIVEADEKTGGVSASVTSSTHERKSKTYVILKKDRIVLNHNVLVEPIPIVIVLKALGGLSDYEIMELVAGGDARYQDDFLINFDEATKAGVFTQQQALEYVGSRVKMGGPKKGRSMAAPRRSPVEEGLDALANVVVAHVEIQDLDFYPKAIYIAMMVRRVLMASHDPKLVDDRDFVGNKRLELAGQLLSLLFEDMFKMFVGSLKGNMEYFFKKPNRTSAYDPVGPISSQGQYITQGLNRAIQSGNWNVKRFNMNRAGVTHVLSRLSYIAALGMMTRISSQFEKTRKVSGPRALQPSQWGMLCPSDTPEGEACGLVKNLALMTHITTNAEEEPVKNWIFSLIPGVEPIRMFTGTEMHRPGSYIIHLNGTPFALTRHPKQFAARFKTMRRRGHISPFVGIHINEHFSAIHIATDEGRICRPYIIVKDGKPRLKKEHLRLLQLGKATFDDFLKNSVIEYLDVNEENDALIAIREEDVNQSTTHMEIEPFTILGAVAGLIPFPHHNQSPRNTYQCAMGKQAIGAIAYNQFNRIDTLLYTLVYPQRPMVITKTIQLIHYDKLPAGQNATVVVMSYSGYDIEDALVLNKASCDRGFGRCQVFRKYTAELQQYPNGRKDRLGGIQKDEEGRTIAKHACLDKDGLAVVGYRVHSGETMIMKETPIDQTSTGIGSDRGSDEFRPAPINYRIPDPAYIDKVMVSNTEKNTAIIKVQTRQTRRPELGDKFSSRHGQKGVVGIIVDQEDMPFSDSGLVPDIIMNPHGFPSRMTVGKLFECLTGKASVVAGRRDYGFGDAFRSHPVEEMGRVLIEHGFSWEGKDYFTSGITGEPHEAYLFNGPIYYQRLKHMVQDKMHSRSRGPRAILTRQPTEGRSRDGGLRLGEMERDCLIAYGASQLLLERLMISSDGTQVDICERCGLLGYKGFCQTCGSTSQVTQMTMPYAAKLLVQELISMNVGVRMQLEDKFPHPR

SEQ ID NO: 4552 - DNA, 360 bp, Myceliophthora thermophilia
atggactcaccgacttttagtctgctgcacgttgcagacgttgcaggtgagcgcgtggggtcgaacatgaggctgactcctggtcttgggcaaatgtactgcatgctgacgagagaagccgacaataccagcaatggccaccatcatgagctgccatcactcatggatgaggtcaaatctggcgattggggcccttgggaaagggaaaccgtgtcgaatcacatacgggcccatagccctgaggtcgcaccgagatcgacggggtgtgcggtgatacccctcggtgcgtctcgtcgggcagtggtgggctgcacagatctgtcgcagaaccggaccggacctgctggcattggctcatag

SEQ ID NO: 4553 - protein, 119 aa, Myceliophthora thermophilia
MDSPTFSLLHVADVAGERVGSNMRLTPGLGQMYCMLTREADNTSNGHHHELPSLMDEVKSGDWGPWERETVSNHIRAHSPEVAPRSTGCAVIPLGASRRAVVGCTDLSQNRTGPAGIGS

SEQ ID NO: 4554 - DNA, 2562 bp, Myceliophthora thermophilia
atgcccgtgacccggtcccggacttacttgagtgacatcggcctcgaggacagcaacaacacgaccggcttcctgttcggagacgaagactcgaattcggcagagaacagaacgactcccacagcgcaggttggtaataccgacccattcccatccttattccggcagcaggcatatccaagcatgacttctgcctcttctgctgccctcgaccttgccctctcacaacagacttctgggcccgagcaactttcaaacgggtggaacagcattaacagacatcaccacaagcagaatatgtctactatgggctccaatcaacataacggcggtgcgccgctcggttcgccctccgaagccagcaccattggcagcacccgtccggccaatgtccgccactcgatcgacggcataaagctctttccagagaccacgacttctgcgctggatacacctgctacctcagtcgtcgcacctcccaactcccacatcctggcatctccccccacgctgcaccagtcctattccgccaacgacgtgccgaccgtcaagcccaacggtaccacgatcattgggagcaacgcgaacaaccacgcccagcagcacttccacaaccacaacgctagcattggccgcattcccgttggcgccatgcctagtcgtcacaatcgcgagctgtcatcggatggctcgtcgggtaacggccgcgatgctgccacatacccgtccatcacctcgactttgcaggctagcgcgccacccttcggcccctcctccactcagccgcagcaagcctcatcggctgcggcgcccgccatgaccgcgccggctcctaccatgccgtatccgttctaccctgcaaacccgggttacaatgccatgggcgccccccctcctgctggctacaacgccctccccatgctgatgcagaacatgtcggtctccaacggcaaccctccggccatgtacccgcagcaaaattatacgggctacaaccccctctacaaccagccttcggcccctaggccgcaccaggacagccaggcgcgcgtcatccagagccgccgccagatggacagtgaaggtgagatccctcttcccctccgcgcagctttcgtcgatgcaccaggcaatgctaacgacggtataaacatcggaatagccatggctcgcttcaacaatctgccgcttgaacaggttggcgggactatctactctctttgcaaggatcagcacggctgccgctacctgcagaagcaactggagaaccgcattcctgagcaaatccacatgatctggctcgagaccaaccagcacgtggtcgagctgatgaccgacccctttggcaactatctttgccaaaagctgctcgagtactgcagcgacgacgaacgtaccgttctgatccagaacgcagcaccgagtatggtgtcgatcgccctgaaccagcatggtactcgagccctccagaagatgatcgagcatgtgaccacgcaggttcagatcaacctgatcgtcgaggccctccgcaaccaggtcgtcgagctcatccaggatcttaacggtaaccacgttatccagaagtgcctgaacaagctcagcgccgccgatgcctccttcatcttcgacgcggttggcaagcactgcgttgaagtgggcactcaccgccatggctgctgcgtcctccagcgctgcatcgatcacgccgacggcaaccaaaaggtctggctcgtcgagtgcatcaccgaacacgccgtcaccctggttcaggacccgttcggcaattacgtcgttcagtacatcattgacctcaacgaggccaccttcacggagccgctggtgaagcagttcgagggccgcatcgcgcagctgtcaaagcacaagttcagctccaacgtggtggagaagtgcttgcgctgcgcttcagatgagtctcgggacatgatcgtgtcggagcttctggcccccggcgagatcgagcgactgcttcgcgactcgtttggcaactacgtgatccagaccgctctcgactactcgactcccatctcgaagcaccgtcttatcgaggccattcgtccgctcctccccagcgtccgcgccaccccttatggccgccgcatccaggccaagatccaggcttacgataaccgcactggcccgaacaatgccggacaggtgctgccgaccgatcccgcgggtggtcaaatctccatccgctcggcccacaaccgagccatgccgaatggcgcttcggtactctcaaccggaacgtacgccaacggcgccaatacaaaccacggtgccggcatgaacggtggtcacgcacccggccctgtgtaccccagcagtgcggccatcgcagtccctccttctcagaaccagacggccgcccagcaacaacaacagcagcagcagcagcagcaacagcaacaaaagcagcagcagcagcaacagcaacagcaacagcaacatcagcagcagcagcagcagcgcccgcagcagttccagcctcagtataatcccgttggaaatgctgagaatggcgagcctcaatgggtctga

SEQ ID NO: 4555 - protein, 853 aa, Myceliophthora thermophilia
MPVTRSRTYLSDIGLEDSNNTTGFLFGDEDSNSAENRTTPTAQVGNTDPFPSLFRQQAYPSMTSASSAALDLALSQQTSGPEQLSNGWNSINRHHHKQNMSTMGSNQHNGGAPLGSPSEASTIGSTRPANVRHSIDGIKLFPETTTSALDTPATSVVAPPNSHILASPPTLHQSYSANDVPTVKPNGTTIIGSNANNHAQQHFHNHNASIGRIPVGAMPSRHNRELSSDGSSGNGRDAATYPSITSTLQASAPPFGPSSTQPQQASSAAAPAMTAPAPTMPYPFYPANPGYNAMGAPPPAGYNALPMLMQNMSVSNGNPPAMYPQQNYTGYNPLYNQPSAPRPHQDSQARVIQSRRQMDSEGEIPLPLRAAFVDAPGNANDGINIGIAMARFNNLPLEQVGGTIYSLCKDQHGCRYLQKQLENRIPEQIHMIWLETNQHVVELMTDPFGNYLCQKLLEYCSDDERTVLIQNAAPSMVSIALNQHGTRALQKMIEHVTTQVQINLIVEALRNQVVELIQDLNGNHVIQKCLNKLSAADASFIFDAVGKHCVEVGTHRHGCCVLQRCIDHADGNQKVWLVECITEHAVTLVQDPFGNYVVQYIIDLNEATFTEPLVKQFEGRIAQLSKHKFSSNVVEKCLRCASDESRDMIVSELLAPGEIERLLRDSFGNYVIQTALDYSTPISKHRLIEAIRPLLPSVRATPYGRRIQAKIQAYDNRTGPNNAGQVLPTDPAGGQISIRSAHNRAMPNGASVLSTGTYANGANTNHGAGMNGGHAPGPVYPSSAAIAVPPSQNQTAAQQQQQQQQQQQQQQKQQQQQQQQQQQHQQQQQQRPQQFQPQYNPVGNAENGEPQWV

SEQ ID NO: 4556 - DNA, 1011 bp, Myceliophthora thermophilia
atgccgtcaagcaagctactacgaggatgcacgcctctggcctcccgccctacgcgggccctcaagccgacgacatgcctccgccctcaacggagcacagcagcgtccgttagacaagcccacaccgggcaaggccgtctcctctcgcccagtacaagctcttcccttcgcccacgcctcacaccgtctcagccgcaaccatggcgagccctccttcccaaaaccgcccgccgcaccatcttcatccagaccgagaacacgccgaacccggacgctctcaagttcctcccgaaccaccggatcctcccggagagcgtgagctcgcccttcatcgaatacctcaacccacgctcgaccatcgcgccgccgtacccgtccccgctggcggcacagctcatgaatatcgacggcgtgacgtccgtcttctacggcgccgacttcatcaccgtcaccaaggccgccgacgccaactgggcgcacatccggcccgaggtgtttgcgctcatcaccgaggccatcacgtcgggccagcccatcgtcaacgtggcggagcgcagggaaggctccgccgcctcctccggcggcgccggcgccgcagggggtgcgcgggagggcgcggaggcggccgagcaggacagcctggcatacgacgagaacgacagcgaggtggtcgggatgatcaaggagctgctcgaaactcgagtgcgcccggcgatccaggaagacggtggggatatcgagttccgcgggttcgaaaacggctacgtgctgctcaagttgcgcggcgcgtgcaggacatgcgactcgagcaccgtgacgctgaagaatggcatcgaagggatgctcatgcactatatcgaggaggtcaagggtgttcatcaggtgctggaccaggaagaggagatcgccatgcaggagtttgccaagttcgaggagaagctcaaggcccagaagggtgaagtgcccccttcaacctcgggcaacgggtcgcttgactctgcttccggttaa

SEQ ID NO: 4557 - protein, 336 aa, Myceliophthora thermophilia
MPSSKLLRGCTPLASRPTRALKPTTCLRPQRSTAASVRQAHTGQGRLLSPSTSSSLRPRLTPSQPQPWRALLPKTARRTIFIQTENTPNPDALKFLPNHRILPESVSSPFIEYLNPRSTIAPPYPSPLAAQLMNIDGVTSVFYGADFITVTKAADANWAHIRPEVFALITEAITSGQPIVNVAERREGSAASSGGAGAAGGAREGAEAAEQDSLAYDENDSEVVGMIKELLETRVRPAIQEDGGDIEFRGFENGYVLLKLRGACRTCDSSTVTLKNGIEGMLMHYIEEVKGVHQVLDQEEEIAMQEFAKFEEKLKAQKGEVPPSTSGNGSLDSASG

SEQ ID NO: 4558 - DNA, 222 bp, Myceliophthora thermophilia
atggggcaatttgactggttcggcaaaatcggggcgacaccagaggccgtcgccgtgcttaacgaccagcctcacctcttcaccatcctgatcatcgtcctcatcgccctcatcctccagtgtgtactgcattggtacatccactatgccaccatgaaacccgaacagaaaaagaaaaaggaaaagaagggggagaagaagggtcccgagcaaaaacgttga

SEQ ID NO: 4559 - protein, 73 aa, Myceliophthora thermophilia
MGQFDWFGKIGATPEAVAVLNDQPHLFTILIIVLIALILQCVLHWYIHYATMKPEQKKKKEKKGEKKGPEQKR

SEQ ID NO: 4560 - DNA, 552 bp, Myceliophthora thermophilia
atggcggcaagcgggaacaatcgctcaatggagtcgcggactgggaggagtaatcaaagatacaattcgaaaggcgagcgcctggtcgccggtgtggtgcctttgaccgaggacaaggcctacgtgatgctgatacagtcgacgcggcggaagggctgggtgctgcctaagggcggctgggagacggacgaggaatgtcacgaggcggcggcccgtgaggcctgggaggaggcgggcatcttcgtgcagatcgactacgacctgggagacatccacgagacgagcccgcgcaagaaggcatcaccgtcgtcttcgtcttcgtcgtccaagagctccggcaaggattcgaccaaggacggcaaggactcgcctaaggagaagccccgctcgctctatcggttttacgaggtcactgttaccagcgaagaggccgactggcccgagcgggagaagcgcgagcgcaagtggttcacgttcgccgaggccaaggacatgctgaaggaccggcccgagctgcaaaccgccctggaacggtcgaccatgaagaggtag

SEQ ID NO: 4561 - protein, 183 aa, Myceliophthora thermophilia
MAASGNNRSMESRTGRSNQRYNSKGERLVAGVVPLTEDKAYVMLIQSTRRKGWVLPKGGWETDEECHEAAAREAWEEAGIFVQIDYDLGDIHETSPRKKASPSSSSSSSKSSGKDSTKDGKDSPKEKPRSLYRFYEVTVTSEEADWPEREKRERKWFTFAEAKDMLKDRPELQTALERSTMKR

SEQ ID NO: 4562 - DNA, 3708 bp, Myceliophthora thermophilia
atgggcttcaagaagttcaaggccgatgtctccacggcaggccagaaagctgccagcggcgaaattccaggcgtgcgctccataacgactggcgactctgatggcgaggttgtcatcaagtaccatcatgagagcttgctggcagatgttcgcatccaggccctggctcaggatgtcggcgagtatcccgacggaaacatgttcatgctctggaccgatgatccagatccgcccacacccgtggccgctgcggtaaaagccgcccgagaatacctgctaggcatgtccgtctacgaaatggtgacggagctggtccgccgcttggagaaggagattggccgcgcacttgacggagaggtcggaagcccgggcgacgtgactgaagaagacgaagttgacgactatgatgttgcatttgacacagactatccctcagatggggacgaatttggcctcccgtcactgccagcgcaacgctcgcaccacaacttgaactcgtcagtcaaccaaaaagacttgcttcggcgcatcaggagagacctccgagaggtaagagaagctggctacagagtcggcttcctcgatggctttggcaaggattctacaaccggcaccattgctctttccatccgtcttgacaaactggctctatcgaacgaggccatggaggcgtgggatgtgaagcccaccgagtacgttgtcctcctagtccggttcgacaggaagtactatccactggaacaagtctttaaccaggctgccgcgcgcacggaagtggccttccgcatcggaaaatgcagcaaacacaagccgtcgatcgagcaggcctcgcgagccttcgcaaagcccaaccgttccgtttccaccgaggggtccgaaccagtgaagtcgacagaacgggatagcgatgagacaaggttcgagaaactactggtctctaactcgttggactcgttcatgtgtgagagtttcatatctctcctcaagatccgggaggctcacggctgcagctgggaaaaggccaatgacgtcttgttgtcaaggatcggtttagttgccgaggagagctgggggtataacccgcactctgatgccgactccaacaacactgcccccgagcccgaacctgttcgggtccccggcgcagaccaccttctgcagggaggcaatgacagcgagcgcagcttccctcttattgcggtccagttcgccatgcgctactttgttaggtgcaccgaatactgcctgcggtgccatcgtcgtctcgagaaaggcttcgaagctctgcggccctacgtctgctctgacccactgtgcctgttccagtacatggccgtgggactcggcccttcgatagagcatgagattcttacggagccttacgttgtcgatctcctcgtcagcctatgctacgccgccgtccaaccagcctccatccacttggcaaacaatccttcgaatacgcgtcccaagttcccaatccgctccttcccggtcggcttgcgcctcagggttccggacttgaccaatcccacggcagtaacattcaaggcgaggctcgaagccggtgacaagcatatcgtttttgaagatgaggccgcgaaaagcctcggaggccgcctggcaccaggcgcttggcttgctttcccaaaccccacgacgcgcctcatccggaatgcacgggtgaaggaagtctacagctctcccaagaccgccgttattgaagtgattggcgagtctgtcgtctcttggtccttttcacaatacagtccgcaatacttgccaaaccaaccagggccgagtcctgccaccggtagcatgacgccaagcgcagcgacggacgacgctgacatggtggatatctacctctacgacactgactttgactcctcggacgacttcagcaaggccgccgcaatgcgacatcttctcgatacccttccgcccatcctcgagattgaggaatggctggccagtcacccggggcacagtttccgcgccatgggacgcatctcccccgctgccgcgtcgctccttcaatggattgtgtcctcaaaccggtcctgtattcttcaggttgaccgctcgcgggctatcgctcgacgagcaaaggggcccatcgagaggggaaaaccagcgcccggcgcgaagaagaagaacatggggcctccggagaccgctggagtagctggcaggggaagaaaccgggagcacgagcgcatcttgggcatggatggatgggtccaatttcgctttgcccagggtgcaccagacaaggaattacgcttcaaccgagccctccaagaggtcgctgcacgcaagcacatcggccataacccgaccattttcgcatggcacgggagcaacttagcaaactggcacagcattctgcggaccggcttggacttccagaacatcaacagcgggcgcgcctttgggcatggtgtctacttcagccggtggaaagagaccagcgtgggatatgcctccaaggggcaatcgtggcccaactcagacctcggcatcaccaactgcttgagtctgaacgagatcatcaatgcaccggacgagtttgtgtcctctaaccctcactacgtggtgtctcagctggattggcagcagtgccgttacctctttgtccagacagccgcgggtaggacgcaggagttggctcaagaccaggcagccaatggtggtacgacgaccagcccggctttctatccacaggcgcggggaggtgaggcttttggacaaggctaccagcccttgaaaatccctctgtgtgccatcccacttcgaacaattggcccggcaccagccacgccgccggattccgcgaaacggacaatgcacctgctggaggagagtgaagacgaggatgccgaagacgcgtcccgcctgatgtcagatgatgaggacgacgacttctacattccaccgagcaaaaaaccagcatcgccggcctctagtgtgggcgcggcgagcattcaaaacatatctcatgtaagccgcggcggccctccgagcccggccagcagcagcgtcggccgcggcctaaccgagtttgagcccggcgcactagacctctcaactctcccgcgccttcagcccccttcgtttgcgaccgacggcgccacaagagcgctcagccgcgagctgcgggatctccaggccctgcaggccaagacaccacttcacgagctcggctggtacgtcgacttcgacaacgtgagcaacctgtaccagtggatcatcgagctgcacagctttgacgtaagcttgccgctagcccaggacatgaagctggcccaggccacctcggttgtgctcgagttgcgcttcggatcggactttcccttctccccgccatttgtgcgcgttgtccgcccgcgcttcctgcccttcatggagggcggcggggggcacgtcacggcgggcggcgccatgtgcatggagctgctgacggagtcgggctggagtccggccaacagcatggagagcgtgctgctgcaggtgcgcatggcgctgtgcaacttggagccgagaccggcgcggctggaccccaggctcctgaggaagactggcgcccgccccgggtataagggggattatagcatcggggaggctatcgaggccttcacgagagccgcgaaatcgcatggttggacggtacccaaggggttgaaggttactgccctggggggttaa

SEQ ID NO: 4563 - protein, 1235 aa, Myceliophthora thermophilia
MGFKKFKADVSTAGQKAASGEIPGVRSITTGDSDGEVVIKYHHESLLADVRIQALAQDVGEYPDGNMFMLWTDDPDPPTPVAAAVKAAREYLLGMSVYEMVTELVRRLEKEIGRALDGEVGSPGDVTEEDEVDDYDVAFDTDYPSDGDEFGLPSLPAQRSHHNLNSSVNQKDLLRRIRRDLREVREAGYRVGFLDGFGKDSTTGTIALSIRLDKLALSNEAMEAWDVKPTEYVVLLVRFDRKYYPLEQVFNQAAARTEVAFRIGKCSKHKPSIEQASRAFAKPNRSVSTEGSEPVKSTERDSDETRFEKLLVSNSLDSFMCESFISLLKIREAHGCSWEKANDVLLSRIGLVAEESWGYNPHSDADSNNTAPEPEPVRVPGADHLLQGGNDSERSFPLIAVQFAMRYFVRCTEYCLRCHRRLEKGFEALRPYVCSDPLCLFQYMAVGLGPSIEHEILTEPYVVDLLVSLCYAAVQPASIHLANNPSNTRPKFPIRSFPVGLRLRVPDLTNPTAVTFKARLEAGDKHIVFEDEAAKSLGGRLAPGAWLAFPNPTTRLIRNARVKEVYSSPKTAVIEVIGESVVSWSFSQYSPQYLPNQPGPSPATGSMTPSAATDDADMVDIYLYDTDFDSSDDFSKAAAMRHLLDTLPPILEIEEWLASHPGHSFRAMGRISPAAASLLQWIVSSNRSCILQVDRSRAIARRAKGPIERGKPAPGAKKKNMGPPETAGVAGRGRNREHERILGMDGWVQFRFAQGAPDKELRFNRALQEVAARKHIGHNPTIFAWHGSNLANWHSILRTGLDFQNINSGRAFGHGVYFSRWKETSVGYASKGQSWPNSDLGITNCLSLNEIINAPDEFVSSNPHYVVSQLDWQQCRYLFVQTAAGRTQELAQDQAANGGTTTSPAFYPQARGGEAFGQGYQPLKIPLCAIPLRTIGPAPATPPDSAKRTMHLLEESEDEDAEDASRLMSDDEDDDFYIPPSKKPASPASSVGAASIQNISHVSRGGPPSPASSSVGRGLTEFEPGALDLSTLPRLQPPSFATDGATRALSRELRDLQALQAKTPLHELGWYVDFDNVSNLYQWIIELHSFDVSLPLAQDMKLAQATSVVLELRFGSDFPFSPPFVRVVRPRFLPFMEGGGGHVTAGGAMCMELLTESGWSPANSMESVLLQVRMALCNLEPRPARLDPRLLRKTGARPGYKGDYSIGEAIEAFTRAAKSHGWTVPKGLKVTALGG

SEQ ID NO: 4564 - DNA, 765 bp, Myceliophthora thermophilia
atggcctctgcagagtctactttgccaacccacggcgacgctcctgcaccgaccgaaagcgaacctctgctcggcaggccaggcgacgcaacccagagacccgacgccccgatgatttacaacctcttcctcggcacgggcaagctggcccaggctggtgcactgctcctcctcgccatcatctgggcctccgtcttcaccaacccgaccctcccgctcgtgtctccccaccctcttctacaatccttgggcgtctacaccgtgattcaggcaattctgattcttcagccgaccaacactccacataccaagctcctgggccagcgcgcccatttccgaatgcacatcctctccctgtccctcttcgtcgccgggacgaccatcatcgaggtcaacaaggccaccaaccacctcgcccacttccactcgccccacgccttcctgggcgtcatcaccctctccctgctcctcctccagtacctcttcggcctcaccatctgggccgtgcccgccctctacggcggcgaggaccccgccaagcggctgtggaagtaccaccgctgggtcggctacgcggccctgctcctgctcctggccaccgtcgcggccgccgtcgagaccgactacaccaagagcgtgctgcgcatccgcctctgggccgtgctcgtggccgaggccctcatcgtcgccggcgtcttcccgagggtgcacctgagaaagttgggcttgcggtcaccccgcgcctcctcctcctcctcctcctga

SEQ ID NO: 4565 - protein, 254 aa, Myceliophthora thermophilia
MASAESTLPTHGDAPAPTESEPLLGRPGDATQRPDAPMIYNLFLGTGKLAQAGALLLLAIIWASVFTNPTLPLVSPHPLLQSLGVYTVIQAILILQPTNTPHTKLLGQRAHFRMHILSLSLFVAGTTIIEVNKATNHLAHFHSPHAFLGVITLSLLLLQYLFGLTIWAVPALYGGEDPAKRLWKYHRWVGYAALLLLLATVAAAVETDYTKSVLRIRLWAVLVAEALIVAGVFPRVHLRKLGLRSPRASSSSSS

SEQ ID NO: 4566 - DNA, 1623 bp, Myceliophthora thermophilia
atgcaggcccctgtcttggtgatgaacacccagagcggtgataggcagacgggtcggagcgcccagctgtccaacatcgccgccgccaaaactgtcgccgacatcatccggtcatgcctcggccccaaggccatgctcaagatgctgctcgaccccatgggtggcatcgtgctgaccaacgacggccatgccatcctccgcgagatcgaggtgtcgcaccccgccgccaagagcatgatcgagctcagccggacgcaggatgaagaggtgggcgatgggaccacaaccgtcatcattctggctggtgagatcctggcgcaggcgctgccccagctcgagcgcaacatccaccccgtggtcatcatttcggcattcaagcgggcgctcaaggacgcgctgcagatcatcgaagacatctcgctccccatcgacgtcaacgacgacaaggcgatgtaccagctcatctcgtcgtcgatcggcacaaagttcgtctcgcgctggtcggagctcatgtgcagcctggccctcaaggcggtgcgcaccgtgacgtgggatgtgggcaacggcaagcgtgaggtggacatcaagcggtacgcgcgcgtcgagaaggtgcccggcggcgagatcgaggacagcagggtgctggacggcgtcatgctcaacaaggacatcacgcaccccaagatgcggcgcaggatcgagaacccgcgcatcatcctgctcgactgcccgctcgagtacaagaagggcgagtcgcagacaaacatcgagatcaccaaggaggacgactggaaccgcatcctccagatcgaggaggagcaggtcaaggccatgtgcgagcacatcatcgcgctcaacccggatctggtcatcacagagaagggcgtctcagacctggcacaacactacctcatgaaggccaacgtgaccgcgctgaggcgggtccgcaagacggacaacaaccggatagcgagggcgacgggcgcgaccattgtcaaccgagtagaggacctgcaagaatcggacgtgggcacgaagtgcggcctgttcgagatcgagaagatcggcgacgagtacttcaccttcctgaccaagtgcaagtcgcccaaggcgtgtacgatcctgctgcgcgggccgtccaaggacgtgctcaacgagatcgagcgtaacctgcaggacgccatgggcgtcgcgcgcaacgtcatgttccacccgcggctgtcgcccggcggcggcgccaccgagatggccgtgtcggtgcgcctggcccagatggccaagagcatcgagggcatccagcagtggccctacaaggccgtcgccgaggcgctcgaggtcatcccccggacgctgatccagaacgccggcaagagcccggtccgggtgctgacggacctgcgggccaagcacgccgagggcaagagctcctggggcgtcaacggcgacacgggcgcgctggtcgacatgaaggactacggcgtgtgggagcccgaggccattaaggtgcagagcatgaagacggcgatcgagtcggcgtgtctcttgttgagagtagacgatatctgcagcgccaaaaaggcgcaaccgggcgtcggcacgggcggtggcgggatggatgagtag

SEQ ID NO: 4567 - protein, 540 aa, Myceliophthora thermophilia
MQAPVLVMNTQSGDRQTGRSAQLSNIAAAKTVADIIRSCLGPKAMLKMLLDPMGGIVLTNDGHAILREIEVSHPAAKSMIELSRTQDEEVGDGTTTVIILAGEILAQALPQLERNIHPVVIISAFKRALKDALQIIEDISLPIDVNDDKAMYQLISSSIGTKFVSRWSELMCSLALKAVRTVTWDVGNGKREVDIKRYARVEKVPGGEIEDSRVLDGVMLNKDITHPKMRRRIENPRIILLDCPLEYKKGESQTNIEITKEDDWNRILQIEEEQVKAMCEHIIALNPDLVITEKGVSDLAQHYLMKANVTALRRVRKTDNNRIARATGATIVNRVEDLQESDVGTKCGLFEIEKIGDEYFTFLTKCKSPKACTILLRGPSKDVLNEIERNLQDAMGVARNVMFHPRLSPGGGATEMAVSVRLAQMAKSIEGIQQWPYKAVAEALEVIPRTLIQNAGKSPVRVLTDLRAKHAEGKSSWGVNGDTGALVDMKDYGVWEPEAIKVQSMKTAIESACLLLRVDDICSAKKAQPGVGTGGGGMDE

SEQ ID NO: 4568 - DNA, 1203 bp, Myceliophthora thermophilia
atgtcgaacaatacgaccggcggggaggacgacctcccaacgcccacggacacgtcgccaagtcctaccgataccacagatgaacctcaaaatcctcaaggccctacaagtactccgacggactctccggatgaccctacgccaactccaccaacgacatcgacaacgacaacgacaacaacacgacctacgacgtcctccccaccggcaactaccaccgaccgtccccagccgacgtccacctcttcgagcgatgaaggcgaaccaccagccgagaccaccagcagtagcagcgataacccaatcccgacaagctcttcggtcccgaataatccaggaccatcaacgagtacacaaacacgatatacgacagtcactacgggcctgcccccgacaagccaaaccagctcgtcgtcgacaccgtcgcccacgtcaacttccggctccgccattgaacccagtgatacgccaagctcggggctgagcaacagcgcgacgatcgcggttgccgtcgtcgttcctgtcgtcgccgtggctctcctgtctctgctgggcattttcctgtggcgaaagaggaagcagcgcagggatgccgaggagcagagacgtaaggaggtcgaggactatggatacaaccccaatgccgaccccacgatccccgcggttgcaggctccgcctacgagatgagggaggacgactcggctggctaccgcgggtggggcagcacggccgcggccggttcgactgggaggaaagcgtcgacgaccatgtcgggcggcgccggcgcttcctactctggcgctacttcgccgacgagagccgacgcacggtctggcgagccgctcatgggtgatgccccgccctccccggagggggagatcctcagggccatgggaccgtcggctgcaaataaccgctctgacgtgcgccgcggcccctcgaacgcctcgtcatcgtacagcgctgccggccaatcagacggctccggtgagggtccgatcggtgtcgcctacggcggcggcaacccgtactatgaccagtatggcgcgggcaacccgtacgtggacaacggttacggcggacagcctgtcgaggcaggcgggtcgccggtcatccgggatgtgccggctaggagaaacacgcggatcgagagctcttctcattatccgcagccgactgccggcatcgcccaaaacttctaa

SEQ ID NO: 4569 - protein, 400 aa, Myceliophthora thermophilia
MSNNTTGGEDDLPTPTDTSPSPTDTTDEPQNPQGPTSTPTDSPDDPTPTPPTTSTTTTTTTRPTTSSPPATTTDRPQPTSTSSSDEGEPPAETTSSSSDNPIPTSSSVPNNPGPSTSTQTRYTTVTTGLPPTSQTSSSSTPSPTSTSGSAIEPSDTPSSGLSNSATIAVAVVVPVVAVALLSLLGIFLWRKRKQRRDAEEQRRKEVEDYGYNPNADPTIPAVAGSAYEMREDDSAGYRGWGSTAAAGSTGRKASTTMSGGAGASYSGATSPTRADARSGEPLMGDAPPSPEGEILRAMGPSAANNRSDVRRGPSNASSSYSAAGQSDGSGEGPIGVAYGGGNPYYDQYGAGNPYVDNGYGGQPVEAGGSPVIRDVPARRNTRIESSSHYPQPTAGIAQNF

SEQ ID NO: 4570 - DNA, 417 bp, Myceliophthora thermophilia
atgtctggatttccgtcaagaccgctggcttcgcacgtgcggcagccgtcgctctccgcaaacgccggggggcagtctcccgctctggtggcgcgggtcaatgagaagaaggccgagctggagaatctcaaggagcttcgtgatctcagcgctgctgttgctacgcagatggaggcgctcgagcagaagcttgccacgctttccgatgggacagaagccatcgccttggtattaagcaactggcataatgtgctgagggcaatcaacatggcatcggcgaaactgcccaaactcgccgccgagcctggtgatgaagaccagccgcctcttccccagacgctcgttcggatcccaacagaacatgctcctgcacttcaagcccatgcggaaggagcggctgaagaagagtctgggtga

SEQ ID NO: 4571 - protein, 138 aa, Myceliophthora thermophilia
MSGFPSRPLASHVRQPSLSANAGGQSPALVARVNEKKAELENLKELRDLSAAVATQMEALEQKLATLSDGTEAIALVLSNWHNVLRAINMASAKLPKLAAEPGDEDQPPLPQTLVRIPTEHAPALQAHAEGAAEEESG

SEQ ID NO: 4572 - DNA, 1377 bp, Myceliophthora thermophilia
atgatgatcccagtcacgtcacccgttttacgtcgcgttcgttccatggccgtgtcaacatcgcaacggcggaggtgggacagcgacattcccaccgtcttccgcccgctggtgcgcgcacgcagcaaacagcaacagacaggtccgacgcccgatccccagcgtgacgaaccgttcctggcgggcctccgacgcatcctcttgggcccgctctcttgtcggagttttcccacctcttgcgccgtgctcattggcggtgccacctttctcgagctccctgtaaaatcgctgctcgaccgctatggctggactatctccgaagttgccaggagaaggctctcgcgctggctcgcctcgttcatcgcgggcatggctgagcctgaggctgctgcaaccgtccgctacgccggccgcaccctcgaccttaccttcctcgccgtgacccgggcgctggacgtagtcgtcggcgagctctggcggcgccgcagggtacgtcgccaggccacagggcagtggacccgcctcgagcgcgccgtctcccgcctggccgacccggccctcttcgccctctccagcggcctcatcatgtggacctggatctacctgccctcgcggctgccgcgcgcctacaacaagtggatcgcctcggccgccgccgtcgacgcgcgcctcatcaccgccctccagcgctgccgcgagggcagcctggtctacggcaaggacacgggccaggcgccgctgctgggctccatgtgcgccgactacggctggccggccgcctggggagacccggcacagtcggtgccgttcccttgcgagatggtgcacatgggctgcgggccctcgtgcgagtaccacgccctgtcgcgcttcgtccgttccttccgctgggccatgacgacctacctgcctctcaccctgctcctggcagcacgcggcggccgcggcggcgccgccaaggctctgcgcagggccctcttgtccgcctcccgctcgtccgccttcctcgccaccttcatcacgctcttctactacggcgtctgcctggcccgcacgcgactgggcccgcgcgtcctcggcagggacgcggccgcgtgccagcgcgtcgacggcggcctctgcgtcgccgccgggtgcgtgctgtgcggctggagcatcctgctcgagaacgccgcccggcgcaaggacatcgccctcttcgtcgcgccccgcgccatggccaccctgttcccccgccggtaccccctggacgagcagtggcgggagacgctcgcgttcgcggcgagcgccgcggtcgtgatggccgcttttgccgagaatcgggcctcggtgcggggcgtggccggcggtgtgctgggttgggtgtttcgggagtga

SEQ ID NO: 4573 - protein, 458 aa, Myceliophthora thermophilia
MMIPVTSPVLRRVRSMAVSTSQRRRWDSDIPTVFRPLVRARSKQQQTGPTPDPQRDEPFLAGLRRILLGPLSCRSFPTSCAVLIGGATFLELPVKSLLDRYGWTISEVARRRLSRWLASFIAGMAEPEAAATVRYAGRTLDLTFLAVTRALDVVVGELWRRRRVRRQATGQWTRLERAVSRLADPALFALSSGLIMWTWIYLPSRLPRAYNKWIASAAAVDARLITALQRCREGSLVYGKDTGQAPLLGSMCADYGWPAAWGDPAQSVPFPCEMVHMGCGPSCEYHALSRFVRSFRWAMTTYLPLTLLLAARGGRGGAAKALRRALLSASRSSAFLATFITLFYYGVCLARTRLGPRVLGRDAAACQRVDGGLCVAAGCVLCGWSILLENAARRKDIALFVAPRAMATLFPRRYPLDEQWRETLAFAASAAVVMAAFAENRASVRGVAGGVLGWVFRE

SEQ ID NO: 4574 - DNA, 630 bp, Myceliophthora thermophilia
atgtacgaatatacggaatactctacggattactcagtacggaacacttctccctcttccccgcatgggaacaatgaaatcaatgaaatccttctagaacaccaccgggatccttcctgcaccctggtcagacgaccgacaatcatgaatgtcattgctggctcggacgctcgactctcgcacgttatcgaagagaagccaacagctcgcaaccttagatcggcgggcagtagtccacgcgatgtgactttgcgtgcaggtggggacaaggtgcaatctgacagccatgattggccgagcgagccttcgaaaccgagccctcgccgtttcggcttcgtccttccccgggccttcgacgcggtggacatcttcgggcccatcgagatcctgcaagccctctcgcggcagacccatctcgagctggcgctcctcggccggaccctcgagccggtcacgacggagccggccaacgcggccatgaacaagttcaactcgtccttctggccgcggatcgtgcccacccacaccttcgccgacagcccggccctcgacgtgctcttcgtccccctgcctgcctgcctgcctgtgctctctttcctagctggcttaggaagtcgcaggtggccttag

SEQ ID NO: 4575 - protein, 209 aa, Myceliophthora thermophilia
MYEYTEYSTDYSVRNTSPSSPHGNNEINEILLEHHRDPSCTLVRRPTIMNVIAGSDARLSHVIEEKPTARNLRSAGSSPRDVTLRAGGDKVQSDSHDWPSEPSKPSPRRFGFVLPRAFDAVDIFGPIEILQALSRQTHLELALLGRTLEPVTTEPANAAMNKFNSSFWPRIVPTHTFADSPALDVLFVPLPACLPVLSFLAGLGSRRWP

SEQ ID NO: 4576 - DNA, 1836 bp, Myceliophthora thermophilia
atgtcgtcaacgagctcgcagagcccgccgaaacgaccgaggctgtcactccagatcaaggctcttgccaacggcccgagtgtgcggacgtcgaggtgtctcgccgctgccgtcgacgtcacgtcgccaacgtcgttcaacacgctctccaatgtttacgccaccgccatcgaccggtccacgccgatccaggaggtcccgccaacggcaatcccatgcaggagaccgatgctcaagctgcagacacaggacgtcgccgcgtccaacggcgccgcacataacacgccctacctggggccttacctcgacactcccgtcacttcgcagccgtctcccccgcgtgccatgacggccacgcccccgctatcggcgcaaccacacgagcagggcggtgctcaggtcttcttcacctctgacgggacgacgccggtaaccgccctgtcacggggcgtgaacccccctgcgcagcagcagtcgacgcagaattcttccaattccaacaagcggcggactacgatgcccgtcggcagcggcgccaagctgccctacatccacccgcgcagcctccgcagcatcctccgcaactcgcctctgccgccgtccagtgccaaatcgcccgaatctccaaggcggcagtcgcgccgcctgcaggagaaggccctccgccgcgtggcctacaacagccccctcgagcaggagatcacgaccagccggtacacaaagtcccacatcgacctcctcgccgaggaggccacgccaatctccccatctgcctcgtcctcggatgacggcgacagcctcgaccaggccatggccgacgcggccagcggcgacaacacgcgcgacggcggccagacgcccggcccgttcgaggagatgcgccgccgcatggccggcatgcacgcgtcctcgcccacggcgctgtcgcccacgggaggcggcatccgcaagcggggcagcaagcgccgggagaagaagcgccgttgggtgtggacgatcgggcaggacgaggatggcgaggacgccgagggtgccgacgcagcaccggcagtcgccgacgaaaatgtcccggcccctccctcggtcccccttctctccatcccggctcccaggccgcggacgcgaagccagcaggcacaactcgccaaagcggtcgccgcagcaaccgggggccagccacagcagcagcagcagcagcagcaaacacaggtccccctcctggccgtgccagtggccccagcccgcgccgcaaccgccaatcctcccgcccaacctcccacaccggccccagaagctccaccctcacccgcgccgcaggaatcccaacccgaaccacaaccccaaccccacccgctccctcagcaacaacaccagcagcagaccgctcgggagctcaccccgatcccggcctccctcgtccccactcgaccgtccaccccggacacgggcgaccgggtcccgtcctgcgccacagatgcccgccacgccactcccgaaggcatgatcgagccccccacgcccggcatggagtcgaccaccagcgcctgcagcagccagcatagcggcagggaggaggaggaggagggggaggacggggacgtggacatgtcggacgcgagcagtttcacctctgtcgaggacgtcgccaccgccgcccctactgccagagactttcaccatcatcatcacccctacacccataagaaggggacggcggatgtgctgcgcggggatgcggatgttgagatggacgatggcacgcccaccatgacggctcggccggtcggagccggaggtggccgggggtgggtcccttggagggacgctgctccttga

SEQ ID NO: 4577 - protein, 611 aa, Myceliophthora thermophilia
MSSTSSQSPPKRPRLSLQIKALANGPSVRTSRCLAAAVDVTSPTSFNTLSNVYATAIDRSTPIQEVPPTAIPCRRPMLKLQTQDVAASNGAAHNTPYLGPYLDTPVTSQPSPPRAMTATPPLSAQPHEQGGAQVFFTSDGTTPVTALSRGVNPPAQQQSTQNSSNSNKRRTTMPVGSGAKLPYIHPRSLRSILRNSPLPPSSAKSPESPRRQSRRLQEKALRRVAYNSPLEQEITTSRYTKSHIDLLAEEATPISPSASSSDDGDSLDQAMADAASGDNTRDGGQTPGPFEEMRRRMAGMHASSPTALSPTGGGIRKRGSKRREKKRRWVWTIGQDEDGEDAEGADAAPAVADENVPAPPSVPLLSIPAPRPRTRSQQAQLAKAVAAATGGQPQQQQQQQQTQVPLLAVPVAPARAATANPPAQPPTPAPEAPPSPAPQESQPEPQPQPHPLPQQQHQQQTARELTPIPASLVPTRPSTPDTGDRVPSCATDARHATPEGMIEPPTPGMESTTSACSSQHSGREEEEEGEDGDVDMSDASSFTSVEDVATAAPTARDFHHHHHPYTHKKGTADVLRGDADVEMDDGTPTMTARPVGAGGGRGWVPWRDAAP

SEQ ID NO: 4578 - DNA, 2178 bp, Myceliophthora thermophilia
atgccgtcgcccgaaattcgttcacatcagatgcccggggcggagcgacctttgagcgagcgaattacccttcctttcgctgcgcatatcatccgcgctccgaatgatggctttgctcggctgccggaaatttctgccgatttcaatcctcagcgacggtcatctccgcttcttacaggagttaattccattcccattccagatcgcactcgcttggcgcagcgcgtgcctgagcgccctgtttcttacgtgttgaattcgtatgaagatggagaggtccgccgttacggggccggcgaatcgtaccggcccttcaatcgcgaccgtgaccgatcaccaccaccccgcgttcgaagcccgttgagggaccgggcccggtcccccccgcccgtgaccagcgatagctacgtccctgccagatctccgcgccgccgatcgcgcagcgccgaccgcttcaggcgcgagagatctcgagagaggatcggcggcgagagttggcggcgcagccgtagtcgagcccggagccctcctcgccgcagctcgccaaggaggagtcccatcagacgcactcctccccgcttcgtgtccccacgtcgagacgatcgcggtctggacaggcgggatgacaggcgggatgacaggagggatgataggagagatgacaggcgagacgataggagagacgacaggagagacgacagaagggatgacaggcgagatgacaggagagacgatcggtgggatgacaggagagatgaccgaagagatggccgaagagatgacagacgagacgacaggagagatgagaggtgggatgataggagggttgacaggcgagacgacaggaaggacgacaggtgggacgataggtgggatgataggagggatgacagagatgaacggccaaggtcgccgatgcggaggcagtttgagatcagggataacaggcggaggtcacgctcgccgttcgacagagaccggttgccggttcaccgagaccgatcaccacccagacgctcaccgccgccgggcccgcgtgggggaggcacgtatcgtccccgctctcggagcccagactggcgggaccgcgaccgcgatgatcgctacgtcggaccttcgtatcgccgaccgtcaccgccaccgctccgagactccgttcactcgtcggcattgccctcacggtctgcatcgggtaggtcctcgccccggccagcctctgttcgccgggacgaccggtccgtaccccagtccccagctgcacggtctcacgtatcgaacgcgccaacgcccacaagcgcagccccgccggctcgcgacaccccgaagccagcggctccgcctccgcaaccgtcgcagccacctgcgaccagtcaaaccgttccaaaagcccccgcagcagatgccaacccgactccggtgaagtctcctccgaagggtccggcagctcttagggcaccgcccaccgggcctgccgcagcgaggaacttcacatcaccagtagcgcctcaagctgccccttcacctcgccatctcccttctggtccgagcggaccttctcgccatggtgccacaagccccacagtgcccccggccggacctcgcggctatgttccgcctcgtgccccgagcttcacgggtcgcggtggtgccaggggtagctggtcagccggcccgcctcgccatagcatctctggcggcggcagccaaaccggctcaccgaccatctcccaaggcgggtccagtgttggcggcattccgaccgggcccagagcgcagtccgcctcctccgcctccgcctccgcctccgcctccccctcgctcggcggcgccaagccattcaacccgccgaccggcccatcgggtcacatgctcgcctcgcacagcgcacgcccatcgctcgcccagagcctgctcaacaccatgccgcccatcatcccgggcggcaagattgatccgacggcactgcccgtcgagatggacccgcaccacaagcgcatgcgcgacgaggaggagcggctgcgcgaagagctgcgggtcaagcaggacaagttgcgcaagagcctgcgcatctgggataagctggagagagagagcaaggggttcgagctgaagagcgacctgagcgagagaagtctgaagaacattgcgggcgagggcttgggaggcgcagccttctaa

SEQ ID NO: 4579 - protein, 725 aa, Myceliophthora thermophilia
MPSPEIRSHQMPGAERPLSERITLPFAAHIIRAPNDGFARLPEISADFNPQRRSSPLLTGVNSIPIPDRTRLAQRVPERPVSYVLNSYEDGEVRRYGAGESYRPFNRDRDRSPPPRVRSPLRDRARSPPPVTSDSYVPARSPRRRSRSADRFRRERSRERIGGESWRRSRSRARSPPRRSSPRRSPIRRTPPRFVSPRRDDRGLDRRDDRRDDRRDDRRDDRRDDRRDDRRDDRRDDRRDDRRDDRWDDRRDDRRDGRRDDRRDDRRDERWDDRRVDRRDDRKDDRWDDRWDDRRDDRDERPRSPMRRQFEIRDNRRRSRSPFDRDRLPVHRDRSPPRRSPPPGPRGGGTYRPRSRSPDWRDRDRDDRYVGPSYRRPSPPPLRDSVHSSALPSRSASGRSSPRPASVRRDDRSVPQSPAARSHVSNAPTPTSAAPPARDTPKPAAPPPQPSQPPATSQTVPKAPAADANPTPVKSPPKGPAALRAPPTGPAAARNFTSPVAPQAAPSPRHLPSGPSGPSRHGATSPTVPPAGPRGYVPPRAPSFTGRGGARGSWSAGPPRHSISGGGSQTGSPTISQGGSSVGGIPTGPRAQSASSASASASASPSLGGAKPFNPPTGPSGHMLASHSARPSLAQSLLNTMPPIIPGGKIDPTALPVEMDPHHKRMRDEEERLREELRVKQDKLRKSLRIWDKLERESKGFELKSDLSERSLKNIAGEGLGGAAF

SEQ ID NO: 4580 - DNA, 1287 bp, Myceliophthora thermophilia
atggccgaccaaggcggatcgcaacacggcatagcccgcacgtcgcgtgtgcgcaccgaggagcagaggcagcgcgaccttgaacgcatcgccaaataccgcgagctcgaggatcaagtgcgcgcgcacatcggccgggccgagtacacccccgaagtcttccaactcacgtccaagctcttgcgcctcaatccggagtactacacgatatggaacgcccgcaggcgctgcctaatctctggctcattctcaagaccatcggctgggtcatcatgctcgagggcgtcctcgagtacttctccttccgccactacagcaccctcttccaccagctcctcgtcgtcttcctcggccgcgacccatcccgcccccggctccccgacagctgggaggagtggtacaacagctgacccggcagcgaccaccgcgacggcatcgaatcccgctcagaatgaagaaccctccgcagccgaagcacaggacctctccatcatcaagtccgagctcacattcaccatcccgctcctgctcgagtccccaaaatgctactggatctggagctaccggctgtggatcctccagcaggccatcgcgcggctgcgcccggccctggcccgtagaatatgggaggaagagctgggcctcgcgtccaagatgctgggcaaggaccggcgcaacttccacgcctggggctaccgccggcacgtggtccagcagctcgagagcgccaccctggaggggagcagcatggtcgaggccgagttcgcttatacggacaagatgatcttcaacacggacctctccaacttctcggcgtggcacagccggagcaagctgatcccgcgcttgctggacgagagaggcgcggatgaggcggcaaggcgcgcgttcctggataaagaattatcccagatccgcaacgccctcaacgtggggcccgaggaccagtcgctatggtactatcaccaattcttgatcctcaacatcgtcgagccggagaagcacccctccatgacgcgcggcttcacccgcgaagaccgtgtggcatatctgaggcgggagattgacgagatcaaggacctgctggaggattacgaggatgtcaagctgatctacgaggggctgttcgagtatacgctgtatctgtgccagctcgaggagcgacagccggatgagactgagcgggcggatcttgcagcgtggctcggcaagctgaagcagctcgatccaatgcggaacgggaggtgggcggacctggagagggattgcaggctcaaggatcaatga

SEQ ID NO: 4581 - protein, 428 aa, Myceliophthora thermophilia
MADQGGSQHGIARTSRVRTEEQRQRDLERIAKYRELEDQVRAHIGRAEYTPEVFQLTSKLLRLNPEYYTIWNARRRCLISGSFSRPSAGSSCSRASSSTSPSATTAPSSTSSSSSSSAATHPAPGSPTAGRSGTTADPAATTATASNPAQNEEPSAAEAQDLSIIKSELTFTIPLLLESPKCYWIWSYRLWILQQAIARLRPALARRIWEEELGLASKMLGKDRRNFHAWGYRRHVVQQLESATLEGSSMVEAEFAYTDKMIFNTDLSNFSAWHSRSKLIPRLLDERGADEAARRAFLDKELSQIRNALNVGPEDQSLWYYHQFLILNIVEPEKHPSMTRGFTREDRVAYLRREIDEIKDLLEDYEDVKLIYEGLFEYTLYLCQLEERQPDETERADLAAWLGKLKQLDPMRNGRWADLERDCRLKDQ

SEQ ID NO: 4582 - DNA, 2439 bp, Myceliophthora thermophilia
atgctgccgagtgtttctttccgaccacgatctcatcgtgagcgtctcgcccgcagttcgctagacccgcctagccccttagattcgggctacggctccgcttctccgggaccatggaccccggaacaacctgacaaggaaaatgaacagccgttggcggacgttcaaagtctctatgacggcaaccagtccgactcggatgacgccttcttcaacagtgaccaagaaaatatcttgacagatgtggaatctgatttcgttgactcaatctcagggttgcgcacggcgggcagcctccataagaggccagccactctagcacagcggaccccacgctctcgcccagccttgccggcttcgttctattcaccatcaaacgcgagggcccagcagcgggggtttaagacggcgtcactgcgtcacctcgaccgttatattcctgcaagacaccagggaagagatgcagctgagatgtttaggacgagcaagccaccgtacgagctgactgcaaacgaaagacttgtccggcatagcggagctacagaagatccgtttgtctaccgccgacggattgtgacacccatgagtgcggagattcgctcatggtcccgtgccggaacggctgctagccggaatgaagtgggtaatgttcttggtccactcgatcaaaatagcatcgatggaagcgacactcgggtcgatgccagcaccgcctggaccatcggccttggaggaaccgcagttaacaacggccgaggccaactagtcaggagtgggaccaatgcccgcctctttcgggccactttcccaaccgcgagaccaagaaccgaggaagagacggaaaagtacaaggcgcggcttgcggcagcacttgggctagaccgggcgcagcgtgttctcgatgtcaatctcacgacttatcacctccacacgagcaacaagcctgggtttgttgcgacgcaatggagtggtacggaatgggtcaatgacgggcccttgcccaaaccgcaaaagccgctcggaaaccggacattacccacagccccgttcaaggttctcgacgcaccaaacctgcgcgacgacttttactgctcaatcctggcatattccccaacatcccagacgctggcggtcgggttgggtaacctcctctacggctggtcggaaactcgaggggtgcagctcctaaacgccggcaccaaccccgacagctacctgaccagcttgtcgttctcgtccgctgaaggctgcaaggcgatccttgccttcggaaggtcggacaagacactaggtctgttgtcgttgtatgatgacccggatcctaccacctctcgttcagccccgaggccgcggtttgaagtggtgcaaccgtcggcggtggcctgtctgagctggaagcctgtctgcaccatcaggccctccagaagccatgctagccccggcatacccgcgaagaacgaagacttgctagtcggggatgaaatcgggatgatatattattacgcagtcgaatggccggagcgatgggaggtggaacgcaataactggccgggggatatgacgctgctggcacgcatcgctgctcacacacagcagatatgtggactagcatggtccaagaatggcgatgtatttggcaccggtgggaacgacaacatatgctatcttttcgatgctctcggggcccttggaaaccatcccgcaaaccgtgatcgcagcaaggaggaccaaaccggacactcgacaggggcgcatgcccatacgttgagtgagatatcggacgctgaaactgagattcagctgctgcgaaccgccccctaccaccctgccaaacacctgggaccggggaacgcgaggcaccgatgggtccacggcgccgcggtcaaggccattgcattctgtccctggcaggacagcttggtggctacggggggagggtcaaatgacaagtgcatccatttcttccacaccggttccggagccgccctagcctccatttcggtctctgcccaagtgaccagcctcatctggtccacgacccgacgcgaaatcgcagcgacgttcggctacgcccatccggatcacccagtccgcattgctgtcttctcttggcccgaatgccgccagatcgccgccataccctgggccggcgagcaccgcgcgctctatgccattccgtacccctgcgggcccgacgacagggcatcggcggggttggagggggcgagaagttggagaacggcagcgcgacggcacagccgcagtcgcaccgcgaaggagggctgcattattgttgcatccagcgataggagcgtcaagttccacgaggtctgggcggcggataagaggggaaccgccagtgtggcaggcgtgctcggtggaagcccgattttggagttcctagaaggaattgatcgggaggggatggtgattcggtaa

SEQ ID NO: 4583 - protein, 812 aa, Myceliophthora thermophilia
MLPSVSFRPRSHRERLARSSLDPPSPLDSGYGSASPGPWTPEQPDKENEQPLADVQSLYDGNQSDSDDAFFNSDQENILTDVESDFVDSISGLRTAGSLHKRPATLAQRTPRSRPALPASFYSPSNARAQQRGFKTASLRHLDRYIPARHQGRDAAEMFRTSKPPYELTANERLVRHSGATEDPFVYRRRIVTPMSAEIRSWSRAGTAASRNEVGNVLGPLDQNSIDGSDTRVDASTAWTIGLGGTAVNNGRGQLVRSGTNARLFRATFPTARPRTEEETEKYKARLAAALGLDRAQRVLDVNLTTYHLHTSNKPGFVATQWSGTEWVNDGPLPKPQKPLGNRTLPTAPFKVLDAPNLRDDFYCSILAYSPTSQTLAVGLGNLLYGWSETRGVQLLNAGTNPDSYLTSLSFSSAEGCKAILAFGRSDKTLGLLSLYDDPDPTTSRSAPRPRFEVVQPSAVACLSWKPVCTIRPSRSHASPGIPAKNEDLLVGDEIGMIYYYAVEWPERWEVERNNWPGDMTLLARIAAHTQQICGLAWSKNGDVFGTGGNDNICYLFDALGALGNHPANRDRSKEDQTGHSTGAHAHTLSEISDAETEIQLLRTAPYHPAKHLGPGNARHRWVHGAAVKAIAFCPWQDSLVATGGGSNDKCIHFFHTGSGAALASISVSAQVTSLIWSTTRREIAATFGYAHPDHPVRIAVFSWPECRQIAAIPWAGEHRALYAIPYPCGPDDRASAGLEGARSWRTAARRHSRSRTAKEGCIIVASSDRSVKFHEVWAADKRGTASVAGVLGGSPILEFLEGIDREGMVIR

SEQ ID NO: 4584 - DNA, 1107 bp, Myceliophthora thermophilia
atgaacacccgaccaggcgccgatcccgtgccgcaggcggtggtgtccggattcgtcccggccccggggccgatcgccgacgccgtcctgcgcgccgtctacgtctccgaccaggacatgtacccggtcgcgctgccctacgcccggctgcgcgcctggcccgacgcctgcggggacctgagcatctgcttccgctcttcttcctcctcctcctcctcctccacctcctcctctaccccccctttaccacccccgtcaccagggcgaggagcaggcagcgccgccccgggcggccgcgacggtgagagtgacggtgacggtcagagtggcgggcacggtcgccgcacttcggaggaggaggagaaggaggagggcggtgtggcggcagcggaggaagaggaggaggcggtggcggtggcgggcgtggtcattgtgcttcccctgcggaggcggttctgggaggatctgctgcaggggcgactgaaggagtgggagatcgagccgcgggacatgtttgcgttccctgtagcaacaacagcggcagcggcggcagcagcgagaagcgcaagtccaggggaccgaactagcgtgggggagcagcaaggcgcagaggaggtcgggctgcacgtctatcatatcgagcgattcgatagcaccgtgtctagcgggcaggggaccaagcggttctcggagtttgctctggccgaggtgatgaggagggcgcgggccaggccggagtggaaggttgtgggcatgtcaggtatgaattttaggctgcgctggcgctggcgctggcgctggcgctggcgctcccgtttcgttggcgggcggactcggggagggaacttggaaccgagggcggtacggaagaggacgtttgaacgcctgggcttctcctcaaccggttaccgagagctgtttgtcgccaagagtcacgagcaggttaccggcgaggccatcgacaagcggccgctggagatagtttacgtttatccgggagaggtggcagagccagacggggtgttcgaagagggtgtcataacgacagtgtccgagatgacggtgagatattataatatcttgattgatctcggcagagcggaatga

SEQ ID NO: 4585 - protein, 368 aa, Myceliophthora thermophilia
MNTRPGADPVPQAVVSGFVPAPGPIADAVLRAVYVSDQDMYPVALPYARLRAWPDACGDLSICFRSSSSSSSSSTSSSTPPLPPPSPGRGAGSAAPGGRDGESDGDGQSGGHGRRTSEEEEKEEGGVAAAEEEEEAVAVAGVVIVLPLRRRFWEDLLQGRLKEWEIEPRDMFAFPVATTAAAAAAARSASPGDRTSVGEQQGAEEVGLHVYHIERFDSTVSSGQGTKRFSEFALAEVMRRARARPEWKVVGMSGMNFRLRWRWRWRWRWRSRFVGGRTRGGNLEPRAVRKRTFERLGFSSTGYRELFVAKSHEQVTGEAIDKRPLEIVYVYPGEVAEPDGVFEEGVITTVSEMTVRYYNILIDLGRAE

SEQ ID NO: 4586 - DNA, 2613 bp, Myceliophthora thermophilia
atgtacggattatatccacaaaatgccgaccgaatctcctccattttttccgccgacagaacaaactcccccgtcggcctcttcgtatccgatacccttccgagatttgctaaaacaagttttcttactagaaggtccgagaaggagacgggctcggcgtatgaccgattcctttttttaaagcgatggagcccgagcgacggcggagaagaccagcagtccgcacctatccccacggactcggcttttccgacgatcccagctaaccaagtaaccaaactcgacaacggcagcacctgcatcctgtgtcgaaagcgcaaaatccgctgtgacaggcaactgccgtgcagcaattgcacgaaatccaagaatgccacgtgcgtatacaaagacgatccgcgggttccacggaagcaaggcacttttggcgaaactgggcagacacgcggcggatcggaggctgctgtcgtaaatccgagagctgccagttcgtcctcggagccacggccgccagcagcaacaacaacaacaacaacaaccacaacaaccaccaccaccacagacgccaacaccacctccaccgccatctacggcaccgttggaaagtctgcctgcagctggtctcccgcatcgaaaacctatgtcaagctcacggggaagccggcgtcggagcagaccgcatccgcgggcgcgggcgcgagctcggccaacccgccggtttcgaccttgacaaggaattccctcgtcgaaaccaggacgctgaacttctctgggaatttctactttcacagcgagcaccgcctgaacaagcagtctcagcctggtagggacagttctttcttcattccccgtcaaaccaacaacccatcgccccgtcgaacgtcggctaatcaacgagaccctcagctcgatgacatgattgattttgtggagcgctacctgcgcgacgagagcaagtccagagtgttgcacatcgaaagacgaagtaaggagctgggcaggatcatcaagaagcgccgcgcgcccccgtggccctgcccacttacccccgacttgccggccagggtggtagccgacacgctggttgagagctatcttaacacaagcgagtccgtcctgcgcgtgctgcatatacccagctttcggcgcgagtatgaggccgtctgggatcccagccacgcccccgaccctgccttcctcgtccaactcaagcttgtcttggccattgggaccaccacctacgataccgacttctccctgcgcccgtacgccatgagatgggtgtacgaagggcagacgtggctcacggcgcccgagttcaagcaccggctgggcctcacggccgtccaaaactgcatcctgcttcaccttgctcgcgaagcagcgggtgtaggcgaagacatggcctgggctaccgtcggaatgacgcttcgcatagctatgtacatgggtctgcaccgggacccagccggtctgggccccagaacaatgacgccgctcatagccgagatgcgtcgccggctgtggaacacgatcctcgagctcgcgcttcagtcgagcctgaacgcgggcgggccgccgctcatcggcctggacgacttcgacacggagccgcccggcaactttgacgacgaccagctcaccggccaggagggcgaaacccctaatgttattagcccgaagccgcccgatcagttcacccagaccaccatggctattgctctccgcgccgtgttccctcagcgtcttgccgtcgtcaagtacctcaacgacctctccgggtgcgggacctaccaggagacgctccagctcgacgcgcagctccgcgaggcatgcaagaacctcacccacaccctgcacgcctgccaggcgacgacgaccgatcgaggcccgccgaccgacctcgggctccgcatcgtcgacctcatcctacgccggtactttctcgcccttcaccttccctgcttcgccccggccatgcaagatacggcatttgccttctcccgtcgcgtcgtggtcgagtcggccgtccgcatctggcgcgccgtcttcccgcatccctttgcccggtcgcggcccgacgccgacacggaggagtgggatgccctgcagcgcatcgccatcaacgggtccggtttcttccgcaccgtggctgtgcaggggttcatctcgatcgctgtcgagctcaagacgctcatgcgggaagaggacggcttcggtctcggtccggtagagccccggccggacttgctggcggtcatggaggacttcaaggcgtggtcgtggaagtgtctggagtcgggcacgaccaacaccaaggggtacttggtcgcctgcattgtgtgcgcgcaggtggatgctctgcggaggcggatgacggaggaggacatgtttgctcatgtggtccgcgtgaccgaagagggcgaggagcgctgtcttgagctgctggagcgcatcgaggccagcacccgccccgctcaagaagccttggatgtcggggtcgacggcataggcagcggtatgggtttctcgccggactttgggatggaaacttgggactccatggtcagtggtcgtgatgagttcaaacttggaatatggggccatcgctaa

SEQ ID NO: 4587 - protein, 870 aa, Myceliophthora thermophilia
MYGLYPQNADRISSIFSADRTNSPVGLFVSDTLPRFAKTSFLTRRSEKETGSAYDRFLFLKRWSPSDGGEDQQSAPIPTDSAFPTIPANQVTKLDNGSTCILCRKRKIRCDRQLPCSNCTKSKNATCVYKDDPRVPRKQGTFGETGQTRGGSEAAVVNPRAASSSSEPRPPAATTTTTTTTTTTTTTDANTTSTAIYGTVGKSACSWSPASKTYVKLTGKPASEQTASAGAGASSANPPVSTLTRNSLVETRTLNFSGNFYFHSEHRLNKQSQPGRDSSFFIPRQTNNPSPRRTSANQRDPQLDDMIDFVERYLRDESKSRVLHIERRSKELGRIIKKRRAPPWPCPLTPDLPARVVADTLVESYLNTSESVLRVLHIPSFRREYEAVWDPSHAPDPAFLVQLKLVLAIGTTTYDTDFSLRPYAMRWVYEGQTWLTAPEFKHRLGLTAVQNCILLHLAREAAGVGEDMAWATVGMTLRIAMYMGLHRDPAGLGPRTMTPLIAEMRRRLWNTILELALQSSLNAGGPPLIGLDDFDTEPPGNFDDDQLTGQEGETPNVISPKPPDQFTQTTMAIALRAVFPQRLAVVKYLNDLSGCGTYQETLQLDAQLREACKNLTHTLHACQATTTDRGPPTDLGLRIVDLILRRYFLALHLPCFAPAMQDTAFAFSRRVVVESAVRIWRAVFPHPFARSRPDADTEEWDALQRIAINGSGFFRTVAVQGFISIAVELKTLMREEDGFGLGPVEPRPDLLAVMEDFKAWSWKCLESGTTNTKGYLVACIVCAQVDALRRRMTEEDMFAHVVRVTEEGEERCLELLERIEASTRPAQEALDVGVDGIGSGMGFSPDFGMETWDSMVSGRDEFKLGIWGHR

SEQ ID NO: 4588 - DNA, 2874 bp, Myceliophthora thermophilia
atgaccacacaacaatcggaaggtgcacttctcaatgagaagccccttcaggcgacacccccgactggcaaggaaggccctaacgggagtttggagatgaacgggcattcttcctcgtctccggccgatgcccaaaccgaatccaagaatgcgccggcattaaacggcgaagcacctaccaccgacactccccagagcaaaaacgaagacgcgttttctgcaaaccaagctcttccaaccgcagcggattccaaggatccgcccgccaagactgaaggggaatctgagcgcgacatttcaagcggtatggataaagtgaatatgagggaggacgatcctgcgcaggccgacaccgagatgcccgacgcgcccgccgaccgaacctcggaagacaagatgtctgaagacgtttcgccaaaatcgcatccgaagccggaagaaccctcggatcaaccggacggtcaggataaagaccaaaaagaatcgacggttgctgcggggaaggaggaggccgcaccatcagcaccttcgactgagaaggaggatgtaaaaatggcggatgcgcaggagcaggtcgaatcgccaagcgcagcgggtccctcacaaggcacacagggtactcctgctgctgctgctgctcctggcagccctaaaagtggcgcgggcgatccggcggctaacactccaaacgggccctgcgctgcggctgtcagcgaagcccccgcttcggcaaccgccgacacgagcatgtcggaggcgcaaccttctgcaaagctttcgagagagcgggacattgatagtgaggatgaaccggtcgcgaagcggacaaaggtggatcatgctgcggaccaggtgcaggtcaagacaggcgaggcccaagaccgcacggagcaaggcgaccagcaagctgcagcccctccggcatcgctcagccccacaagcggggaaccaaaaagactcgacgatccctcccttgatgacagcccgatcaccgagtggcaaaacaaacaaatccgtgctgttcttgctggggtcaagaagaccaaggttggacagatgttcaagctgccggttcagcagctgtggccaatgttatggacggagtactcggccaaaatttctaacccaacagacattagcacaatggaaaaacgactgcgcggcgacttgactccgtatgcaaccatgggcgagttcaaggcggacctcaacttgatggtgcaaaatgctgtcacgttcaatggcgagtcccacgacgtgacaatccaggcaaaagcgtgtcgggacgcgattctcagtcggatggcagcgtaccctgcggttgaacctccgaaaccccagaagaaagacacgtccaaggcgcattccactcgccatgtcgagccccgcgcacccgggtcttcggtttccacagctggccccggccgtccctccaaaggctccgccaccagcccgtcgcagaaaccggttcccgaatcgcccgcgtttgcactcccacctggcagcaatggcgttcccctcatccggcgggattccacaaagccagacagtcggacgaagcggcctgtgaagcccgcgcattccaaagacctagtttatgacaccaagcgcaagaagaagctgccacttgacctccgcttttgtgatgaggttcttactgagctccgcaagacgaagcattatgatatcaacgctgctttcatgcagcctgttgaccccgtggcgctcaacattccggactatcacaaagtgatcaagcgaccgatggatctccagacaatgtctaacaagctaagtgcgggcgagtaccagtccataaaagagttcgagaaagacttcgacctcatcatcaagaactgcaagacgttcaacggcgaagaccatatagtctatgctcaggcgcttcggttgcaggacttgtaccgcgctgagatgtccaagaaggacgagtggatggccaagcatgcgccggtcaccgctgcgtcgacgtcccactcagcgggtagggatgagtcagagtctgaggaggccgaatctgaacccgacgccgaagttgacgaagagcgccggcagattgagaaccgtttggctactatccaaaagcgtctccaggccgagcagaacaaggttaacgaaatggtcaactcgggaacagcagacattgcggatgttgagattgcgcagtcggttgtcgccatgctgcaaaagcagttgatgggcgagcgcgccaaacttgccaacctcccggccaaaaagacaagtaaaccaaagccagccaagtctaaaaaggccggcggtgcgggcggcttgcctggcaagaaggctactgccggcccgggcagtggtgccgctaagaagagcgccagtaagaaggccgctccgaagaagaagttaggccagttggaaagggatgtcatcatagactcgctcggcagcctggacggccctcttcttgagcgagctattgatctgattaagaaggacaccggccaaggcgagaacgacgaaggagagctggagctggacatagacatcatctcggaggatgccctttacaagctctttgagatcgcgctcaaggcgaaccccaacgcgttggttgagaagcagcgacagatgggcgtgctggcggccccggcatctgagcagccggccaagtccaggcagctgtccaagtctaagaagaacaagcccatgagcaagagcgagcaggagcgccgcatccaacagcttaatgagctccgcgctcaggcgggtcgtcaggcttctggcagccaggaaccgatggagtcgattgagggcaacgccagtgagcttgctgctcagcccgaccacgccgacagcgaagaagaggctgactcggaggaggattaa

SEQ ID NO: 4589 - protein, 957 aa, Myceliophthora thermophilia
MTTQQSEGALLNEKPLQATPPTGKEGPNGSLEMNGHSSSSPADAQTESKNAPALNGEAPTTDTPQSKNEDAFSANQALPTAADSKDPPAKTEGESERDISSGMDKVNMREDDPAQADTEMPDAPADRTSEDKMSEDVSPKSHPKPEEPSDQPDGQDKDQKESTVAAGKEEAAPSAPSTEKEDVKMADAQEQVESPSAAGPSQGTQGTPAAAAAPGSPKSGAGDPAANTPNGPCAAAVSEAPASATADTSMSEAQPSAKLSRERDIDSEDEPVAKRTKVDHAADQVQVKTGEAQDRTEQGDQQAAAPPASLSPTSGEPKRLDDPSLDDSPITEWQNKQIRAVLAGVKKTKVGQMFKLPVQQLWPMLWTEYSAKISNPTDISTMEKRLRGDLTPYATMGEFKADLNLMVQNAVTFNGESHDVTIQAKACRDAILSRMAAYPAVEPPKPQKKDTSKAHSTRHVEPRAPGSSVSTAGPGRPSKGSATSPSQKPVPESPAFALPPGSNGVPLIRRDSTKPDSRTKRPVKPAHSKDLVYDTKRKKKLPLDLRFCDEVLTELRKTKHYDINAAFMQPVDPVALNIPDYHKVIKRPMDLQTMSNKLSAGEYQSIKEFEKDFDLIIKNCKTFNGEDHIVYAQALRLQDLYRAEMSKKDEWMAKHAPVTAASTSHSAGRDESESEEAESEPDAEVDEERRQIENRLATIQKRLQAEQNKVNEMVNSGTADIADVEIAQSVVAMLQKQLMGERAKLANLPAKKTSKPKPAKSKKAGGAGGLPGKKATAGPGSGAAKKSASKKAAPKKKLGQLERDVIIDSLGSLDGPLLERAIDLIKKDTGQGENDEGELELDIDIISEDALYKLFEIALKANPNALVEKQRQMGVLAAPASEQPAKSRQLSKSKKNKPMSKSEQERRIQQLNELRAQAGRQASGSQEPMESIEGNASELAAQPDHADSEEEADSEED

SEQ ID NO: 4590 - DNA, 1764 bp, Myceliophthora thermophilia
atgctgagcttgggagtgggcaccttacgcagtacctcggcacggctccgatccccaatgagtccgtccgacaacagcgctacctctggtggcgcgaggccatccgagaaggccacaccaccggcgattgtcgagccgacgaaagagaacggggccgtcgacgccggattgaagagcctgcatcattacaggcgagcgcttccaaaatggcggtacaacctgcgacagcggctcctgccgatcattcgatgggagacgccgtaccttgctgccctccaaagctcgatgcgcacgcccgcccttgatagctactttgcgattacggccaatctcgggacacacacattcttcatgatcgggctgcccgtcctcttttggtgtggctttccggagttcggcaagggactggtccgtattctcgcaaccggcgtcttcttcaccggattcctcaaagatctatgctcgcttccgcgcccgctctccccgccactccaacgcatcaccatgtccggctcggccgccctcgaatacgggttcccctccacccactcggcgaacgccgtgtcggtcgccgtctacggcatccttatgctgcaccgcgatactaattccttctccgcctccactaccctcgcgcttgagatcctcgcctacttctacgccttttctatcgtcatcggtcgcctgtactgcggcatgcacggctttctggacgtcatcgtcggctccctgatgggcgccgccatctccctcatcgagttctactttgccgcccgcgtcgaagcttggctatactcgagctcttacattgcgcccttgacgatcgctctcatcatcattgtcctggtccggatccatccagaacccgccgacgactgcccctgcttcgacgacagcgtggccttcgcgggcgtcatgatcggcctggaagtgggcacctggcggtttgcgcgttactcgccctttgcggccgtctacaacgggccggacgccaccttcaacctgtcggcgctcggctggaagcgcgccatcgcccgtctcattttcggcgtcgccgtcatctttgcctggcgcgaggtcatgaagcccaccctgctgcgcttcctgccgcacctctaccgcgtcatcgagacgcacggcttatcgctgcccaggcgcttcttcgtcccggcttcggagtacaaggacgtgcccctccatctccgggacgataacgtcctgccgaacgtgagcgacctgccgaagctggtgcgcagtttccgcgggccgggcaggggacggtccgtcagtgtcggcccgcagagcgccgcagatgcctacgagacgctggcgtaccgggaacgcaggaggagggagagcctggagagcgacggcggcggccggggacttcgtgggaagctgagttcgcggagcttgcgggagaaggcgacggccgatggggagtgctcgcaggtctcgggtgtgcagagcggggggaggctggccgaattcgaaaagcagatggggacggggactgtagcggccagcccgacgtctgagggctcggcggaggcggtaagcggggcggatccgtgcctcagccaggaggatgagctggacgagagggaggtgttctccaagctggtcaagccgcgggtgaggtacgacgtggaggtggtgacgaaactggtcgtctacgctggcattgcatggttagccgtggacggcatcctaattgcctttgaggctcttggcctgggcgccgagcctccgagtacgcgatga

SEQ ID NO: 4591 - protein, 587 aa, Myceliophthora thermophilia
MLSLGVGTLRSTSARLRSPMSPSDNSATSGGARPSEKATPPAIVEPTKENGAVDAGLKSLHHYRRALPKWRYNLRQRLLPIIRWETPYLAALQSSMRTPALDSYFAITANLGTHTFFMIGLPVLFWCGFPEFGKGLVRILATGVFFTGFLKDLCSLPRPLSPPLQRITMSGSAALEYGFPSTHSANAVSVAVYGILMLHRDTNSFSASTTLALEILAYFYAFSIVIGRLYCGMHGFLDVIVGSLMGAAISLIEFYFAARVEAWLYSSSYIAPLTIALIIIVLVRIHPEPADDCPCFDDSVAFAGVMIGLEVGTWRFARYSPFAAVYNGPDATFNLSALGWKRAIARLIFGVAVIFAWREVMKPTLLRFLPHLYRVIETHGLSLPRRFFVPASEYKDVPLHLRDDNVLPNVSDLPKLVRSFRGPGRGRSVSVGPQSAADAYETLAYRERRRRESLESDGGGRGLRGKLSSRSLREKATADGECSQVSGVQSGGRLAEFEKQMGTGTVAASPTSEGSAEAVSGADPCLSQEDELDEREVFSKLVKPRVRYDVEVVTKLVVYAGIAWLAVDGILIAFEALGLGAEPPSTR

SEQ ID NO: 4592 - DNA, 2115 bp, Myceliophthora thermophilia
atgccgcgactctatcgcaaccgctacctgacgtgcttctactgcggccgcaagacctcgactcgctacgatggcaagacgcgccgcttcgactgtcccttttgcgatgccacaaactaccttgacgagaacggcgacatcaccgacccgcccgtcgcgaccgagaccgagtccaccccgcgccagttcgccgccgcccgccccttctccccgccctcgagtccgccggccagcgacgtcatcttctgcgacacctgcctcaagaaccagcatctgctaaacgcgtccctagcccagtacctccccgacccagacgacccggactacgccgagcgcgagaagggcctctaccgcttccgcaggaatcaggaacgtctctacccccagatatgcgagcagtgcgagcccaaggtgcgccagcgcctcgagaaggcccagtacacggccaagacggacctcctgcggcgcatgctcgaccgcagcgccagcgccaggagccgcgtcactacccggggctggcctgagcggtttgatgccgcgggcaggtggctgtggatcgctgggttcgtcctgcaactgggctggcatgccgtcgtggtccacagcctgctttcgcagtacctgatctggtccgaggcggacgatgcccagtttaccttcaggttgctgaggatatgcgggcccctggtgggaagtctcccgtccgacgagcggctgctcggatggagcagtcttgcgaccatcctaggcgtctggtggaacccccgcttttcccaggtctataggggcttcaacagacacatcaacggagtgtcgaaatggtactgctttcaggctatggccgtcggcctgcgtgtttgcctgcggaggatagacggtctgacgacacccgacccggcgcagctgagcacacagacagccgcgcacgctctcgcgctgacatttgccttgctgatcctgactctcgcgccgcgctgcatccgcatcaacatggcacccctcttcggcacccctcataccacccaaaatccgctccgtgacgacccccccgagccctcctccaccacctcccgacacgacgagacaaagaccatagccgacctcctcgacgagatctcccgctctccggtctcgcccaccccaccctctccgacaccaaccgacgcctcctctccctccctcccccggcgccgcgccaacgccctgccgatgggccacaaccacacgcaggccgcgcagaacctgaccgcctccctccgagagattgacaatctccacctcaacctctccccgcgccgccaaccggccgcgagcgcgtggggcgcaggacgcccttattcttccttctcacgctcgtcaccccctcgctcggcaccggatcagggagaagaggagatggactggtctcccaccccctcgtccgcggtcgccgccgccgccgccaccaccaccaccccaacgacgcagccgcccaggtccaagtaccgcgccttcaacacccagggtggccagcgcgccaaccagcccttcggctccgccccgacctcggacgagaaggccgcctccaagcccttctggtaccgcgtgccccccgccccgacgaccccggcgcagcgcgtcttcaacccgcccaaccagccccgcttgcgccccagcccggtcgaggccacgacgccgactccctcgttccgcttcgggcagcagagggactccttcgcgggcggtgggagcgggaataagaagggactcggcttttcgtctttttcgtcatcgttgtcttctgctgctggtgctgctggtgatggtggtaatggtgctgccagggataacgatgcagaagtcgacgggagctggggggaggagcaacagcaacagcaacagcaacagcagcagcagcggcggcagcagcaagacgtgacgtttgccgagccgcgcttcttcgccgagatgctcggccgggctcccggcgtggtgagcgaggaaaggaagaacgacccgcgcaacgagctgtcgggcctgtttggcgagtcgttcaagctgaccgaggaggagaaaaagaggcgggggtggtggcctcggtttgggcgcggcgggaagcaggggaagaaggaataa

SEQ ID NO: 4593 - protein, 704 aa, Myceliophthora thermophilia
MPRLYRNRYLTCFYCGRKTSTRYDGKTRRFDCPFCDATNYLDENGDITDPPVATETESTPRQFAAARPFSPPSSPPASDVIFCDTCLKNQHLLNASLAQYLPDPDDPDYAEREKGLYRFRRNQERLYPQICEQCEPKVRQRLEKAQYTAKTDLLRRMLDRSASARSRVTTRGWPERFDAAGRWLWIAGFVLQLGWHAVVVHSLLSQYLIWSEADDAQFTFRLLRICGPLVGSLPSDERLLGWSSLATILGVWWNPRFSQVYRGFNRHINGVSKWYCFQAMAVGLRVCLRRIDGLTTPDPAQLSTQTAAHALALTFALLILTLAPRCIRINMAPLFGTPHTTQNPLRDDPPEPSSTTSRHDETKTIADLLDEISRSPVSPTPPSPTPTDASSPSLPRRRANALPMGHNHTQAAQNLTASLREIDNLHLNLSPRRQPAASAWGAGRPYSSFSRSSPPRSAPDQGEEEMDWSPTPSSAVAAAAATTTTPTTQPPRSKYRAFNTQGGQRANQPFGSAPTSDEKAASKPFWYRVPPAPTTPAQRVFNPPNQPRLRPSPVEATTPTPSFRFGQQRDSFAGGGSGNKKGLGFSSFSSSLSSAAGAAGDGGNGAARDNDAEVDGSWGEEQQQQQQQQQQQRRQQQDVTFAEPRFFAEMLGRAPGVVSEERKNDPRNELSGLFGESFKLTEEEKKRRGWWPRFGRGGKQGKKE

SEQ ID NO: 4594 - DNA, 2511 bp, Myceliophthora thermophilia
atggatctgcgcaacaacctcttcagcaaacccgctccccgcggaggagctccaggtcttcctggacgccagatacagcgacctccaggagatactgcaggatatgcgcccgttccaaacggctacgatccttacggtggacgctcacctgcgcccgcacgaccgcaaaacccccctggcgggggtggtggctacggcgggggatatgctcagagccgaggccgacaggtgcggttgaggctggcaaaggtcgaagacaagacgttgcaggcacagtacatctttggaaacatctgcgctgtgtcacccaatgacttccctcccaaccgcgacggcaccgacctctacgtacgcctgaccggtaaccagctccgcggcgactatgtggtcacggcgcgcccgacacccggctttcccgacggctgcatcagcctgtcggatccccagcggacgtggtgcggagtcggtatgatggacgaggtggtcggcgagctgtacgatccctacagccagggcgggcaggtgtacatcggctccctcgacgtcgagatcggcttcgcgtcggcgaggaagattgtggacgccccctacgaccaggacgagctggccgccatgttcgtcaggaacttccagaaccagatcttcgcgcccggccagaggctgctcctcgacgtccagaatgtccccttggccatcgtggtcaagacggtgaccctgatcgatctcaccatgcagcagaggccaaccgacgagcctcccacgcgcagcgacccgcaggcccggggtatcctcaccagccataccagcatcggcttctacaaggacgccaggtcgcccatcaaactcaagggctccaacaagcggccggccgccaacgccatcatcagccccgacttcaagttcgaggacatgggcatcggcggcctcgacaccgagttctccaccatcttccgccgcgcttttgcctcgcgcatcttcccgccggggctcatcgacaagctcggcatcatgcacgtcaagggcatgctgctgtacgggccccccggcacgggcaagacgctcatcgcccgccagatcggcaagatgctcaacgccagggagcccaagatcatcaacggccccgaggtgctcaacaagtacgtcggccagagcgaggagaacatccgcaagctctttgccgatgccgagaaggagtacaaggagaagggcgacgagtccgggctccacatcatcatcttcgacgagcttgatgccgtctgcaagcagcgaggctcgggtgccggcggcggcaccggcgtcggcgacagcgtcgtcaaccagctgctgtccaagctcgacggcgtcgaccagctcaacaacatcctcctcatcggcatgaccaaccgcaaggacatgatcgacgacgccctgctgcgcccgggccgcctcgaggtccagatcgaaatttcgctgcccgacgagtttgggcgctcccagatcctcaagatccacacggccaagatgaaggagaacaacgtgatgggcgacgacgtcgacctcgccgagctggccgccctgaccaagaacttctcgggcgccgagctgagcggcctcgtcaagtcggccacctccttcgcctttgcgcgcaacatcaaggtcggcaccatggccaccgtcagcgaggacgtcgccaacatgaaggtcgtccgccaagacttcctcaacgccctcgaggaggtcaagcccgccttcggcgccgacggcgccgagctcgaggacgcgctcccgtacggcatcatccacttctcccagagcatccccgccatcctcaacgacggcatgctctacgtcgagaacgtgcgccagcaggagaggctacggcacacctcggtgctgctacacggccccccggccagcggcaagacggcgctggccgcccacattgccatgaagtcggactaccccttcatcaagatcatcactccggcatccatggtcggcttccgggacgaggtggccaagaaggaccatctccacaagatctttaccgacgcctacaagtctcctctgagcatgctgatcgtcgacaacatcgagcggctcatcgagtggaacccggtcggcccgcgcctctccaacagcatcctccaagctctcgtcaccctcctccaaacgcccccgcccaagggccaccgcctcctcatcctcgccaccacctcacagctgtccgtcatggagcagctcgacatcactaccgcgttcgaccgccagatccgcgtgcccgccgtccaggacacgcgcgagctgtcggccgtgctggccgagtcgggcgccttcgaagggccgggagacgtcaacctggtgctgaaccgcctccgcgagtactccaactcggaccgcgtcggcgtcggcatcaagaccatcctgaccacggccgaaacggcccgcctgagcgccgagcccgccgagtggtttgccgagcagatcgccacgcagattgcgaggtacagtccttatacggggagggagtag

SEQ ID NO: 4595 - protein, 836 aa, Myceliophthora thermophilia
MDLRNNLFSKPAPRGGAPGLPGRQIQRPPGDTAGYAPVPNGYDPYGGRSPAPARPQNPPGGGGGYGGGYAQSRGRQVRLRLAKVEDKTLQAQYIFGNICAVSPNDFPPNRDGTDLYVRLTGNQLRGDYVVTARPTPGFPDGCISLSDPQRTWCGVGMMDEVVGELYDPYSQGGQVYIGSLDVEIGFASARKIVDAPYDQDELAAMFVRNFQNQIFAPGQRLLLDVQNVPLAIVVKTVTLIDLTMQQRPTDEPPTRSDPQARGILTSHTSIGFYKDARSPIKLKGSNKRPAANAIISPDFKFEDMGIGGLDTEFSTIFRRAFASRIFPPGLIDKLGIMHVKGMLLYGPPGTGKTLIARQIGKMLNAREPKIINGPEVLNKYVGQSEENIRKLFADAEKEYKEKGDESGLHIIIFDELDAVCKQRGSGAGGGTGVGDSVVNQLLSKLDGVDQLNNILLIGMTNRKDMIDDALLRPGRLEVQIEISLPDEFGRSQILKIHTAKMKENNVMGDDVDLAELAALTKNFSGAELSGLVKSATSFAFARNIKVGTMATVSEDVANMKVVRQDFLNALEEVKPAFGADGAELEDALPYGIIHFSQSIPAILNDGMLYVENVRQQERLRHTSVLLHGPPASGKTALAAHIAMKSDYPFIKIITPASMVGFRDEVAKKDHLHKIFTDAYKSPLSMLIVDNIERLIEWNPVGPRLSNSILQALVTLLQTPPPKGHRLLILATTSQLSVMEQLDITTAFDRQIRVPAVQDTRELSAVLAESGAFEGPGDVNLVLNRLREYSNSDRVGVGIKTILTTAETARLSAEPAEWFAEQIATQIARYSPYTGRE

SEQ ID NO: 4596 - DNA, 1191 bp, Myceliophthora thermophilia
atgaccagtgtaccgaaaccgggtccggcaaagctccggccaggcgccgggctggacgagtggctcgaggaggccaaacaatgccactacctgcccgagcacgtcatgaagcagctctgcgagatggtcaaggaggttttgatggaggagtccaacatccaacccgtcgtcacgcccgtcacaatatgcggcgacatccacggccagttctacgacctgctcgagctgttccgcgtggccggcggcatgcccggcgagtcgaacgtccaggcgcccatgaccagcacgacagtcatcacgtccgacgacattgagccgccgacagagatcacgaacccgaagctgaagggcaaggtgaagagtgcggggacacctgcagatggcaacggagacgataccgccgctgccgaggcccaggaggaaaccacgcactccgcccccccggctgactctggcgtgcagtcggtccagacgcgttttgtctttcttggagatttcgtcgaccgggggtatttcagcttggaaaccttcaccctcctcatgtgtctaaaggcaaaataccccgacagaatagtcctcgtccgcggcaaccacgagtcgcgccaaatcacgcaagtgtacggcttctacgaagagtgccagcaaaaatacggcaacgcgtcggtgtggaaggcctgctgccaagtctttgacttcctcgtgctggccgccatcgtcgacgggactgtgctctgcgtgcacggcggcctgagccccgagatccgcacgatcgatcagatccgggtggttgcgcgcgctcaggagatcccccacgagggcgccttctgcgacctggtctggagcgacccggaagatattgagacgtgggccatcagcccgcgcggcgccggctggctttttggccataaggtggccaacgagttcaaccacgtcaacgggctcaagacgatcgcgcgcgcccaccagctcgtgaacgaagggtacaagtatcacttcccggaaaagtccgtcgtcaccgtctggtcggcgcccaattactgctaccgctgcggcaacgtcgcctccatcatgaccgtcacgtcgtccgactgcctggagtcgagcacaaagttctccatcttctcggccgtgcccgacgaccagcgccacatccctggcggccgccgcggcgccggcgactactttctctga

SEQ ID NO: 4597 - protein, 396 aa, Myceliophthora thermophilia
MTSVPKPGPAKLRPGAGLDEWLEEAKQCHYLPEHVMKQLCEMVKEVLMEESNIQPVVTPVTICGDIHGQFYDLLELFRVAGGMPGESNVQAPMTSTTVITSDDIEPPTEITNPKLKGKVKSAGTPADGNGDDTAAAEAQEETTHSAPPADSGVQSVQTRFVFLGDFVDRGYFSLETFTLLMCLKAKYPDRIVLVRGNHESRQITQVYGFYEECQQKYGNASVWKACCQVFDFLVLAAIVDGTVLCVHGGLSPEIRTIDQIRVVARAQEIPHEGAFCDLVWSDPEDIETWAISPRGAGWLFGHKVANEFNHVNGLKTIARAHQLVNEGYKYHFPEKSVVTVWSAPNYCYRCGNVASIMTVTSSDCLESSTKFSIFSAVPDDQRHIPGGRRGAGDYFL

SEQ ID NO: 4598 - DNA, 261 bp, Myceliophthora thermophilia
atgattgcttcaccgtccgatcagttctccaactttggcaggggtgcctatgatacgacaggtgttcccaagccgccaccgcctaagcccagatcatgtgtgcgcgcggcaaccaattcaagtgcgagcgacggcaaccgacggcaaccgacgccatcgggcaagctgcagctttgcacctcgacggattgtctcgacttcgccggtcacaagcgcctcctttcttatcattctcgaccttttactatactcgacttttaa

SEQ ID NO: 4599 - protein, 86 aa, Myceliophthora thermophilia
MIASPSDQFSNFGRGAYDTTGVPKPPPPKPRSCVRAATNSSASDGNRRQPTPSGKLQLCTSTDCLDFAGHKRLLSYHSRPFTILDF

SEQ ID NO: 4600 - DNA, 1026 bp, Myceliophthora thermophilia
atgaagtttggcgcagggacaaaaattcatcagggctgcagcagggatcaaggtactgtaggctggttagcgcggcgcggctgcacgcggctcccccggactcgctcacccttgcccgcatacactgcttgtactgtaactacgagcacactaagtctcggcgcgcctgggccgagcgccaatggcccccgtgatcaggaaccacgtgaacaacttttgacttatgatattcgccttggctcagaaatgaggaggcagcactactgcgtagaccagagctctggagctcgccggacaacgagggtcggagacaagacggcttggggaatgcgctgcgtaaatgttgagagggatgcggccattgctctctcggctggcccgcctgcccgatgcctggcaagctacactagggaggaactacgaagtagttccatgacgttcacgtcggaaaagggacccgaacgccacactctcatcgaggccatcaacaaacccaatataccctgtaggtctggtcgtaaagactttctgggcgtccgcaggcaagatcaacggttatgcatttcaatggtcattgatcgctgcaatacgggtactgcttcgtacccatcgacagaggaaacacctcttctgcatgtcggggttgcaacctctgactgggccggtggagagctgcaaaccattacgtatcttaaagctcccgctgtggcttacctgccgccatgcagcatgatgttatggcgtgtcatggggaagctcggttcgattcttgggagggtggcaatggaccagggtcagaccacagcccggcccaacgaatcgagccccgtcaacaaatttcgtcaattgctcggtgtttcgcgcgtttgctgttctgttcctcctcttacactcagcggctacgcggaattcatcaactggccaggcaggggcgggctttcaggttttatggggtttgcaccggttccaagggttgcacatggaagtgcacgcccaggcgaaaaatttggccccgaacctctctga

SEQ ID NO: 4601 - protein, 341 aa, Myceliophthora thermophilia
MKFGAGTKIHQGCSRDQGTVGWLARRGCTRLPRTRSPLPAYTACTVTTSTLSLGAPGPSANGPRDQEPREQLLTYDIRLGSEMRRQHYCVDQSSGARRTTRVGDKTAWGMRCVNVERDAAIALSAGPPARCLASYTREELRSSSMTFTSEKGPERHTLIEAINKPNIPCRSGRKDFLGVRRQDQRLCISMVIDRCNTGTASYPSTEETPLLHVGVATSDWAGGELQTITYLKAPAVAYLPPCSMMLWRVMGKLGSILGRVAMDQGQTTARPNESSPVNKFRQLLGVSRVCCSVPPLTLSGYAEFINWPGRGGLSGFMGFAPVPRVAHGSARPGEKFGPEPL

SEQ ID NO: 4602 - DNA, 1431 bp, Myceliophthora thermophilia
atggcgtcctctgtacagcaagcgtcgaaagcaacgacacagccaggagaggatgacgatgataggaacaccatcgactctattctcctagcgcaagtcagcagcaaaccatcatctcccttcttgagccccgttgtccctcggtcacattcggccagtcccatgtccgagtttggcctaccggcaccgagtcacccgcggggcctgtcgccggctccttatcctctctacccgcgacggaagatgacggtggcggaaatggcgaaacgcttctggaatcggaaccgcggggtgattctggtcgccgtctcgcagctctttggggccctgatgaatcttgcggcgagattgctggaactggaatcagatatgcatccgttgcatatcctctttgtacgcatgagcatgacaacggtcttctcctgtctgtacatgtggtggaaccaagtgccagatttccctctcggtgccaggggaattaggggcgtgctggttgtgagaggcatctccggattctttggaatttacgggatgtggttttcgatgatgtacctcccgctcgccgaagcaacagttatcaccttcctcgcccctatgttggcagggtacatgtgtcatatcctgatgaaggaccccttcacccgcaaagagcaactggcctcccttgtcgccctggccggggtggtcctcatcgcgagaccagcctccctgttcggctccagcggcatagccgcagattcggaaacgctgcatgaagcacaacctgactcaacaaccacaacatctcagcctggagcgggggaagagcctacctcagcccaacgcctcctcgccatcctagttgccctcatcggtgtcctcggggcggccggcgcctacactacgatccgatacgtcggcaagcgcgcccacgcgcttatcaccgtcacctatttctcggcgtggagtacgttggtgagcacggccgcgctgctgctctgtccgttgctcgggatcggacaggccgagcagcccatcatcaacttccgcgccctgctgcggcctctttccgcgcatgagtggttcctgctgctggcgctgggcgtgtgcgggtttgtgatgcagttcatgatgacggccgggatcagcggagaaaagtcgaaccgggcaacggcgatggtgtatacgcacatgttgtttgcggcagggtttgacaagtgggtgtttgggcacgagatgggcttggtaagcctgttgggctgtggaatgatcgtggggagcgcgctgtgggcggcgctggggaagaaggcgcccaccgaaggaaggaggaaggaagaggacgttgagggcgcggggagggtgagcgaggaggcagcgccgatgctggatggggctgaggaggaagaggagggcaggcttaatggaagagagggcctcgcgcgtgagaggtga

SEQ ID NO: 4603 - protein, 476 aa, Myceliophthora thermophilia
MASSVQQASKATTQPGEDDDDRNTIDSILLAQVSSKPSSPFLSPVVPRSHSASPMSEFGLPAPSHPRGLSPAPYPLYPRRKMTVAEMAKRFWNRNRGVILVAVSQLFGALMNLAARLLELESDMHPLHILFVRMSMTTVFSCLYMWWNQVPDFPLGARGIRGVLVVRGISGFFGIYGMWFSMMYLPLAEATVITFLAPMLAGYMCHILMKDPFTRKEQLASLVALAGVVLIARPASLFGSSGIAADSETLHEAQPDSTTTTSQPGAGEEPTSAQRLLAILVALIGVLGAAGAYTTIRYVGKRAHALITVTYFSAWSTLVSTAALLLCPLLGIGQAEQPIINFRALLRPLSAHEWFLLLALGVCGFVMQFMMTAGISGEKSNRATAMVYTHMLFAAGFDKWVFGHEMGLVSLLGCGMIVGSALWAALGKKAPTEGRRKEEDVEGAGRVSEEAAPMLDGAEEEEEGRLNGREGLARER

SEQ ID NO: 4604 - DNA, 2700 bp, Myceliophthora thermophilia
atggctgcgagaacggatgaaccaacaccatcggctgcgaaacagcatgaatccgagacctcctcggatgtccctttatccgcctcctccttctcctcctcctcctcctcttcctcttcctcttcttcctctggcccacctccacctccacctccggagcctgccgaggagtcaccccggcggcctataagtagaaaacgtgccgcctccatcaacacggaagaggccaaccggcccaaggtcgaagtcctcgatctcagcacgccgagcactgcgagcccgcggcccttcgatactaacggggggaggatctgtctctgtacaccggccccgaagattcctcggccccggaacgccttcattctctaccgccagcaccatcaggcccgggtggtgcagcagaacccgggcctggccaaccctgagatctccaaaatcattggggagcagtggcgcgccgagtccgaagaggcgaagagccagtggaagctgctcgccgaggaggagaagcagcgccatcagcgccaacatccggactaccggtaccagccgcggcgtggcaacaaggtcggaagcttacattcctctcggcccacgtccaccccgggcgaagacccgcaccactgtcccaagtgcggcggcaggtacatcgccacgccgaggactccctcgacgccgttcatgatgcccacgggttccaagatagggagtacaccgtacggttctcctccgggggatcacaatctcggatccaaaggagacatgagccggcagaatcgctcccacccggcggcccagtggggcgccgccacctcaaatccttacccttccaatgcgtacgacgtccatgagaggtatgaggccgccatgtctcccaacgacgtcaagcggcgccggtacaacaccacaggaagctaccacaacttccacgccctaccgtcccctcccactccgttcacccagcccggccaccacgcccaataccatcacgcaactccccattcttactcgcgacggccctcgctcagcaaccccaccacaccggcagcaaccgctcacccctctccctcgttatccggcctatccgcgataatgccccctccgcctcgccctagccacgccgtccccgtcgcgggccccgtaccgacctcagcctcagccggcccgtacaagtcctcttcttcctcttcctcccccaaccaacaccgccaccaccactactcccatcaccgccgccaccatcccgactttgatgaatcccttcgcctcccacccctgcaaacacacctgcccgcttctccggacgagaacagcgaacccgcgacagcagccgctgccgccgccgccgccacggtagcagcaggaaccgagacgggcctgggaatcctccatccgacgccgacgattccttcgtacggaggtaaaatggcggggagaggagaggaggaagtcaaggtagagcgggacgtggcagcggagaggacacatgcgcgaagcgtcgaggcgatggtgatgagcatctcatttgtgagcaagttgagggtgctggaaaggatcagtccgccgctgggggccgtcccgggagctcccggcagcgggatgagcagaggccccgtgatcgcggtcgaggggccagatgcgaggatggtgcgggctgtttcccgggtcgtggaacgcgcgctgagggctgcgtcgccggcggcggacgacaagggcggggggtgggaggtgagatgttgggaggacgagaacgcgtctctccagcggcgcgggtcagtcagcggcgggcaggagaaggatgaggcgctgaacaacgccgggcagcagagtgcctcgcgccacggcagccaggcgagcgccatctctagtccgtcggccaacctcaacccattcacggcctacctccgcaccattgccgattggcacgccaagtcggccgagattgtccagttcgtcacctcttcggcgccagcgccagcgccagcctcaactgcgacacgccaaacccgccttttgtccacgtcctccgccgcgaccgccgcatcgagttcttcctccgcagagggccgtacagagtcggacaggaccgaacccgaaggggaagatgaatccgccgtgcgctcgtccgactgccgcgcgctcccttccggttccgcggacgctgcgggagcatcgagaacaaccaccagcgccataaacaaaaacgtcagcaggctacctatcgccctccttccttcgggcttttccctcaccttgtctgatcgcttcgccagcgcggtgctcatctcggacgcctacgcgcccgtcgaccattggcagtggatggcgacgctttggcggggaatagtcgggcccgatttggtgatctatgtctcgggaactagcactctgtctcccggatcggttgctggcaaagatgcaacctcggcgctgggtggcggcggtgttggtccttggaatggctcggtggaggttaagaacgagggtctaatagttgtcaagattcctgctgctgctgctgcttctggcggtagtagtggtagtcgtggctctgggctgggattcgcagaggcagagaggatgatgattgatcaaaagatggagaggcgactggggttcgaggtcgttgagtgggtaaggagcggcggatggacaactgctggacggggagtggatgggggatttaatgtggaatattag

SEQ ID NO: 4605 - protein, 899 aa, Myceliophthora thermophilia
MAARTDEPTPSAAKQHESETSSDVPLSASSFSSSSSSSSSSSSSGPPPPPPPEPAEESPRRPISRKRAASINTEEANRPKVEVLDLSTPSTASPRPFDTNGGRICLCTPAPKIPRPRNAFILYRQHHQARVVQQNPGLANPEISKIIGEQWRAESEEAKSQWKLLAEEEKQRHQRQHPDYRYQPRRGNKVGSLHSSRPTSTPGEDPHHCPKCGGRYIATPRTPSTPFMMPTGSKIGSTPYGSPPGDHNLGSKGDMSRQNRSHPAAQWGAATSNPYPSNAYDVHERYEAAMSPNDVKRRRYNTTGSYHNFHALPSPPTPFTQPGHHAQYHHATPHSYSRRPSLSNPTTPAATAHPSPSLSGLSAIMPPPPRPSHAVPVAGPVPTSASAGPYKSSSSSSSPNQHRHHHYSHHRRHHPDFDESLRLPPLQTHLPASPDENSEPATAAAAAAAATVAAGTETGLGILHPTPTIPSYGGKMAGRGEEEVKVERDVAAERTHARSVEAMVMSISFVSKLRVLERISPPLGAVPGAPGSGMSRGPVIAVEGPDARMVRAVSRVVERALRAASPAADDKGGGWEVRCWEDENASLQRRGSVSGGQEKDEALNNAGQQSASRHGSQASAISSPSANLNPFTAYLRTIADWHAKSAEIVQFVTSSAPAPAPASTATRQTRLLSTSSAATAASSSSSAEGRTESDRTEPEGEDESAVRSSDCRALPSGSADAAGASRTTTSAINKNVSRLPIALLPSGFSLTLSDRFASAVLISDAYAPVDHWQWMATLWRGIVGPDLVIYVSGTSTLSPGSVAGKDATSALGGGGVGPWNGSVEVKNEGLIVVKIPAAAAASGGSSGSRGSGLGFAEAERMMIDQKMERRLGFEVVEWVRSGGWTTAGRGVDGGFNVEY

SEQ ID NO: 4606 - DNA, 3984 bp, Myceliophthora thermophilia
atgtctctgacggagttggccattggccggaaggtccagctggccgaccagcgtgccggcaccatccggtttgccggccagacttcgttcgcgcccggcttctgggtcggcgtcgagctcgaggacgccaccggcaagaacgacggcagcgtcaatgacgtccgctacttcgactgccccatgggctacggcatgtttgttcggcccaacgcgctcaagttactcgcgcagccccccgcgccgttcatgccgcagcccgccaagaagacggcacgtccgagcagcatgctctcgtctggctcgtcgcgcggctcggtccctgccgatcccggcttgacgaagcggatcagcctgaatgatcctagtccgacaccaggccagaagccgtcgcgtccacccagcggcatcagatctcccaccagatcgcccacgaagcagctgggctccgcatcggccagtggagccacttctcgcaccaccacaccgtccaatgcaaaacctgcgccgggggctcgtccccgtctgtctgtctcggcgggtcgcacctccatgggcccgcccccgatgcctgccagacaagcccggcaggcatcttctccaggcaccggtcccaaggcagcttccgtcaatcccaaagctgccggtgcccctgcgcgcacccccagcggtcgcctcgccgccgctgccaccaccaagccgggcatcgctcgcccctctaccaaagcctcgagcagctcgctactgagtgccgccaggtctcttgccggcaaacgctcaagttccggtagcactgcttcagctccaaagagcagcgatgaggaggtcgcctcgccgccccttatcagtcccgtccagtcccggaccatggcactggagaaactcaccggcgcaccggctgccaagcaagccatgaagcccaccacggcgaccaggtcccccaccgacatcaaaccgccgggtgccattgtggcaccctcgcggcccacggccagcactagcacggcccccaacaaggagattgaagagctcaaagccaagctccgcgtcctcgagaagaagagaatggaggaccgagagaagctcaacgatcttgagaagaccaaaagcgaacgcgaccgatttgagaggatcatccagactctgcaaatcaagtatcagcctcagcaacaggagattgccgacctcaagcgccagctgaaggaagctgagactcgtctcaacaatgtcgaggagctccagcaggagcacgaagcggccatggaacttgccacgctcgaccgggaaatggctgaagagatggctgaggtttacaagaccgagcttgatgctctgaagcagaagacagaggaactccagctggaagtcgacatcctccgcgaggagaacgctgagctcaccaagggcgtgtcgtccgaggatcgcgccagcaccggatggctacaactggagaagaataatgaacgactccgggacgctctgatccggctccgcgacatttctcgtgaccaggaggaggagctcaaggctcaggtcaagtcgctgcagcaagacctttccgagtttgaggcggtcaaggagcagctccatgcgtgcaaggaggagctggcccagaaagaagccgccgtcgaggacctgcgagagcagctcgacaatgcactaggagcggaggagctcattgagaccctgacggagcagacaatgaaccagtcagagcagatcaaggaactccaagctaccattcgcgatctcgaggagctcaaggaagttagtgacgagcttgagatcaaccacatccacaaccagaaagaaatgcaagaggaaatcgacaagcgggatgccgttattgccgagcagatccgccaggccgcattgcagcagaaggccaacgaagacatggaatacacggtgtctcgctttagggagctggtcactagtttgcagagcgacttggcagacatgcgtgcttcccacaccgtcacggagaaggaatcggagcagctcaaccagcggtccagggccatgcaggatctcaacatgaaactgcaggtctcggccgccaaggcccaagccaagaccatcgatctcgaactccgccgcatggaagctcaggaagccgaacaacacctcgagatcgtcagcatgttccttcacgacacataccaaaaagacaaggactctgttcttgccttgctccgattcaagagactggcctcaaaggccgatatccttcgccgcttcatcaaggagcggatcaaccgtcagcctcatccgggccacgaaaacgaacagtttgagggatgcgccgccatggacaagctcgcttgggtgtcgtgcatgtgcgatcgtttcatcaactcgatcagccactgttccctcgagcagttcggtaagtatcacgcggctctgtacgagctcgagcccgtcgagcgagccctgaacggctggatcgaagggctcaagcaagacaacctcaaggagaagcagtgtgccgccgagctgcagcggaccattgccctcatgacccacctcggcgaggttcacatttcatatgatctcgagagctttgcagacgacattcacatgaaggcttcgctcatgcaaagctacttggagtcggcagccgtttcctttgcggccacggcagccatggttcagcgggttgtcccgcaagacgaagaagaggagcatgccaagcacttctcgaacaagattgagagcgtcgtgacccagacacgcagcgccaaggttattgccggcaagaccgtgcgcgccttggaggacctgaagtcgagatgcctcattctgcttcccagtgctttcgacaagtttgagcagtgtgagactgcgactgcggagcttgccgacatggcacggagaatcgggctcgatctccacgaattcctgcacgaagagggcaggacagacccatacacctattccgacgttcagtcatgcacgaagaagacggccgcgtccgcattcagctcggacgaggctgagcttttctctacctatctcaacaagctacgaaccgttacctcacagatttcggacctcgcagcactcagcgccgatctctcccagacccaagaattcgagcgcaagccggccccgtggctcctgcgcagggaagagatgcaggtgctgaagtctattccgatcgaggccgagatcgagacccgtcgtcttaaggaagatctggcggaggccaaacgcaccatcgccattcggaatgaagatctcagcacagctcacctgaggattgagacgctcgagtcccgcatgagcgacgtcaaaaccaaggaatggcgcatctttgagctggaagaacagatcgaagtccaaaaggaggagatcattactctcacacaaaacatcaaaaaacaagatcgcgaactcaaattactcgagactgagcgcgacaaatggaaggaagtcgctagcagcaggcggattgtctccagcggcagtgctgaagacgacgacgacgacgaatctgacactaaggatggctatgctcgtgcagtcgcctcatcactcgagttgggcaggatgctcgacaaccttagagcggagctcgaggatcttcagtccacggtacgcttcctaaacgaggataaccaccgcgctcgcacgaaggaacagccgaactatgactggctcgccgagccactcactgagaatccgccgccggcagagcaacgaaaggcccaggtcatcagcgagagtagggctgtgctcggtgaactggtcaacctagcaagcagggccaagattttcgacatgacgagcctgccagccgataaggtggcttggaagcctgcaaagagcactcctcagtatcacgcggcaaaacaaatggaggaatttgcggattggcaatgtcggaaggtcgccactgtgaaaaaggggaaggcacttaggaagggcaaggccccggcgagcgaaggaggtgaaagttcgggaaggaggccatggaggtga

SEQ ID NO: 4607 - protein, 1327 aa, Myceliophthora thermophilia
MSLTELAIGRKVQLADQRAGTIRFAGQTSFAPGFWVGVELEDATGKNDGSVNDVRYFDCPMGYGMFVRPNALKLLAQPPAPFMPQPAKKTARPSSMLSSGSSRGSVPADPGLTKRISLNDPSPTPGQKPSRPPSGIRSPTRSPTKQLGSASASGATSRTTTPSNAKPAPGARPRLSVSAGRTSMGPPPMPARQARQASSPGTGPKAASVNPKAAGAPARTPSGRLAAAATTKPGIARPSTKASSSSLLSAARSLAGKRSSSGSTASAPKSSDEEVASPPLISPVQSRTMALEKLTGAPAAKQAMKPTTATRSPTDIKPPGAIVAPSRPTASTSTAPNKEIEELKAKLRVLEKKRMEDREKLNDLEKTKSERDRFERIIQTLQIKYQPQQQEIADLKRQLKEAETRLNNVEELQQEHEAAMELATLDREMAEEMAEVYKTELDALKQKTEELQLEVDILREENAELTKGVSSEDRASTGWLQLEKNNERLRDALIRLRDISRDQEEELKAQVKSLQQDLSEFEAVKEQLHACKEELAQKEAAVEDLREQLDNALGAEELIETLTEQTMNQSEQIKELQATIRDLEELKEVSDELEINHIHNQKEMQEEIDKRDAVIAEQIRQAALQQKANEDMEYTVSRFRELVTSLQSDLADMRASHTVTEKESEQLNQRSRAMQDLNMKLQVSAAKAQAKTIDLELRRMEAQEAEQHLEIVSMFLHDTYQKDKDSVLALLRFKRLASKADILRRFIKERINRQPHPGHENEQFEGCAAMDKLAWVSCMCDRFINSISHCSLEQFGKYHAALYELEPVERALNGWIEGLKQDNLKEKQCAAELQRTIALMTHLGEVHISYDLESFADDIHMKASLMQSYLESAAVSFAATAAMVQRVVPQDEEEEHAKHFSNKIESVVTQTRSAKVIAGKTVRALEDLKSRCLILLPSAFDKFEQCETATAELADMARRIGLDLHEFLHEEGRTDPYTYSDVQSCTKKTAASAFSSDEAELFSTYLNKLRTVTSQISDLAALSADLSQTQEFERKPAPWLLRREEMQVLKSIPIEAEIETRRLKEDLAEAKRTIAIRNEDLSTAHLRIETLESRMSDVKTKEWRIFELEEQIEVQKEEIITLTQNIKKQDRELKLLETERDKWKEVASSRRIVSSGSAEDDDDDESDTKDGYARAVASSLELGRMLDNLRAELEDLQSTVRFLNEDNHRARTKEQPNYDWLAEPLTENPPPAEQRKAQVISESRAVLGELVNLASRAKIFDMTSLPADKVAWKPAKSTPQYHAAKQMEEFADWQCRKVATVKKGKALRKGKAPASEGGESSGRRPWR

SEQ ID NO: 4608 - DNA, 1341 bp, Myceliophthora thermophilia
atggccagaatcaacacgcaacaagcgagcggcacaccagccacggcttatacgccgagatacattgatattggcatcaacttggcagaccccatcttcaggggccgctatcatggtaaacagagacatcctgatgatctgaaggcggtcgtggggagggccgtcgaggtcgggtgtaccaaactcattgtgaccggctcgtcgttcaagagctcgagagacgcactcaaactcgccaaggagttcccgggcaccgtcttctcaactgccggcatccacccctgcagcagttccatcttcagcccttcccaccacaagcaccacgatgagagccagagcgaaggcgaggaggacgaacacacacccgcctgcgacccggacccgtcaaagcccatacctgacggcgagggcgtcgaccacgagcgcagcaccaagatcattgccgacttgagcgacttcatcacccaagcccgcaacaacacgtcctcatcgtctccggggctcgtcgcctttggcgagttcggcctcgactacgaccgcctgcactactgttccaaagaagtgcaactccactccttcgccgcccagctcgccctggctgcctccctcacgccgcagctccccctgtttctccactcgcgcgccgcccatgccgacttcgtccgcctgctcaaggaagccttcggtccgcgcctggagcgcctcgagaagggcggcgtggtgcacagcttcacgggcacggtcgacgagatgcgcgagctcatggacctggggctgtacatcggcatcaacgggtgcagcttcaagacggccgagaactgcgaggttgtgcgggaggtcgacctgtcccggctgatgatcgagacggacggcccgtggtgcgaggtcaggccgagtcacgagggatggaagtaccttgtcgagtgggaggccaaggccaaggccgcttccgaggccattgctgcggaagaggccgaggttgctgcgccggctgcggcggcggcggcggcggcggcgaacaattctacaaattcctcggaagggcaagagaacgttgagcagctggagaggaaggagaaaccaaagaagcagcagcagcagcagcagcaacaacaacaacaaggaaagaagaaccagaagaaagagcccgaggttccagagcggtacaaggtggtcaagaaggagaagtgggaggagggcgccatggtcaagggccgcaacgagccgtgtaccatcgagcgagtagccaagatcgtggcgggcatcaagggcgtttccctagaggaggtgtgcgaggcggcgtgggctaatacggtcaaggtgttcgggctagactcatag

SEQ ID NO: 4609 - protein, 446 aa, Myceliophthora thermophilia
MARINTQQASGTPATAYTPRYIDIGINLADPIFRGRYHGKQRHPDDLKAVVGRAVEVGCTKLIVTGSSFKSSRDALKLAKEFPGTVFSTAGIHPCSSSIFSPSHHKHHDESQSEGEEDEHTPACDPDPSKPIPDGEGVDHERSTKIIADLSDFITQARNNTSSSSPGLVAFGEFGLDYDRLHYCSKEVQLHSFAAQLALAASLTPQLPLFLHSRAAHADFVRLLKEAFGPRLERLEKGGVVHSFTGTVDEMRELMDLGLYIGINGCSFKTAENCEVVREVDLSRLMIETDGPWCEVRPSHEGWKYLVEWEAKAKAASEAIAAEEAEVAAPAAAAAAAAANNSTNSSEGQENVEQLERKEKPKKQQQQQQQQQQQGKKNQKKEPEVPERYKVVKKEKWEEGAMVKGRNEPCTIERVAKIVAGIKGVSLEEVCEAAWANTVKVFGLDS

SEQ ID NO: 4610 - DNA, 822 bp, Myceliophthora thermophilia
atgacgggcacacttttcacggtgcctatcccgcccctgggcgcccatcccggcggtaccattgtggccacggagccggcgccggccgtctacctgctcaccatcacctcgccgcccgacaaccggctcacgacggcgtcgtgcaacgcactcctcgacgcgctggacctgatcgagttcggcgggtacaagcccggcgtggtggtcaccacaagcggcatcgagaagttctactccaacgggttggacctggaacacgccctgagcaccgaaaactttctgccgggagtgctctacaagctgtttcatcgtttcctgacataccccatgcctaccatcgccctcctgtcgggccacgccttcgcgggcggcctgatgctggccatgcaccacgactaccgggtcatgaacccgacgcgggggttcgcgtgcgtcaacgagctcgagttcggggtgccgctgaaggcggccatgagtagcatcttccggctcaagctgccggcggcgacgtaccgggatctggtgctcgaggcgcgccggttcgcggggcccgcggccgtcgaggccggcctggccgaccgcgtcggcggcctcgacgccgtcctcgacctcgtccgcgagcgcaagctggcgggcaaggcccagacgggcatctacggcctgctcaaggccgagatgtaccgcgagagcgtcgccctgctgagccgccagggctgggagcagggcgaggagcgcgaccgcctgctggccgagtccgaggacaagaggcgccgggagggcgagaagagggtcgccgagttgaaggaaatggcgaggctgtag

SEQ ID NO: 4611 - protein, 273 aa, Myceliophthora thermophilia
MTGTLFTVPIPPLGAHPGGTIVATEPAPAVYLLTITSPPDNRLTTASCNALLDALDLIEFGGYKPGVVVTTSGIEKFYSNGLDLEHALSTENFLPGVLYKLFHRFLTYPMPTIALLSGHAFAGGLMLAMHHDYRVMNPTRGFACVNELEFGVPLKAAMSSIFRLKLPAATYRDLVLEARRFAGPAAVEAGLADRVGGLDAVLDLVRERKLAGKAQTGIYGLLKAEMYRESVALLSRQGWEQGEERDRLLAESEDKRRREGEKRVAELKEMARL

SEQ ID NO: 4612 - DNA, 369 bp, Myceliophthora thermophilia
atgacgggagcagatggccctggccagatccggttcaaacacagaaccagagcagtatcagaaatcgtctttttccaaatggacgttatcctttgctgttccacctcaaccgccgacttggcccgtcgtggaggccacgtggctatcatcaggttcttcagcataaacaaagagactgtgtttcaggaccagtgtggtgaaacggaagtagcagccgtaagaaaggaagcagtcctgcgggggccaaaagcccggagagacactcaagagaccggcttaatgctcggtggaaagacggagcgctggatgcggtcccgtactgcagcgtctgcttcacagactgcggccttggacacgcccccggggtga

SEQ ID NO: 4613 - protein, 122 aa, Myceliophthora thermophilia
MTGADGPGQIRFKHRTRAVSEIVFFQMDVILCCSTSTADLARRGGHVAIIRFFSINKETVFQDQCGETEVAAVRKEAVLRGPKARRDTQETGLMLGGKTERWMRSRTAASASQTAALDTPPG

SEQ ID NO: 4614 - DNA, 2697 bp, Myceliophthora thermophilia
atggagcacacccgacgcactgcagatgccgtggtcgacctcccgtcctaccgagcggccacgacacggccagactggcttgcactcgttgcgccgtacgtccgaatcaacgattacgcgcgtctatgcctcgtctcgcggcatttctaccgccagttcgccccgcgtctctggaatgatcccctcgccgtcatgcatcctgggtgcctgattcggttcatgcgccatgtcaaaacgcgcgttcgggcgaccacgccgggcaatcttgtccgttcctttgacacgcgatgggtctcccagtcttacgactacgccgtctttgcccacgctggtgttggcggcgccgttcccctctcctccctgctcctctctattgcctccggctttccccgcttgaggtgcatcttgctcgacggatatcccaacctggcgcacgagcccccggggagcccgctggcccctgaccggctgccgccgtttgagccgccgtttgagccgccgtttgagccgccgttgcttttgagtactgcccggtgccaggtcgcgctgcccccttctttcttcgcaagcccgtacctcaagaggctcgtatatctggacgtgtccgatatgccgggctctttgaggcacccgcttgcccagcggactctgagcccggccaacctgcccggcttgcgtatcctcaagttgcggggacgcgagatggatgacgcgacagccacccttctcttcaagacttttggggagcagctgtggagccttgacctgagccgaaacaagctcaccggtgacgccctcgatgccctgaaccagttttccttcccttcacagacctcaagaacagaccactactcggtcgagggccgcatcgcatggcttttaacaggcagcccctcttttggcaccttctgcaccgttaccgagtcggaatggagcgccgactttagccatcctcacagacatattgccgatcccccgtgctacattgcccccggcgaggctggacctcatccgaccattgccccccgcttagacggccgggtcaagatcttgcccgactcggccgacgccgtcaaggccatgctctctggtggcgtcggctctcatagccctccactggaatccgtgcagatagcagacgtttgccgagcaccccatggcatcacccacctgtacctgagcagcaacaaggtctcggccgaaggcctctccaggacgatccgctcctctccgggacagctgcagcgcctcgagtgtgactccgtctcgtttaagctccccgacgccgctccgccctcctggctgtccaaggcgagactgtcgggcgccctcggctgcgcccacctgttccgtcccgtattctcggccaacctgcaggtcctgcgcatccaccactcggtggtcacgcaactgctgaccctgtccctcgaccgcctgtcgcccatggcgaacatgtgggtggccgagacgcagctgctcccgcgggccgaactcgcataccccgaggcatttgtgcccgacatgaacccccggctgcagtcgctcgtcctgacgcgcattcctaggtactccacggggccgctcattgacaagctgattgctttcctcaacctcgcctcgatacaggagcgggccatccaggacaccaaatcggccagccggcacggcccggtgaccctgctcgggctgcggcacatccgcctcgagttcgatcctgaccctctggaggatctgtcccgcgacagtttcggcctcgagctcggctttgacgccgcggcagtcatggaggacgccaccaaagagttcagcttctttggcgactcgggctggtcatccgtgctgtcgaccgacaaggcggcgtcacgggcaacgccgccgaatgatcccgagtcggagccgaatccacgaggctcagaatcagaaccaacccgcatatcccagtcggccagatcacacccacctcaccccccttcctccgtccacgctcccgcccccgtcgctcctgccaccgcatgcccggacgaaacatccgtcttccccagacatccggaccatcatcatcatgacagcccagaacggccgaaacgccaactgaatcacgtccgcatcccacactcctggacctggcataagggcgcaaccccgctctccgccctcgtctgggccggctactcctccgaccgccaggaggaggagggggccgggggtgagggcggagaggagggctccggcgaccgcgatgatggcagcgcgccgcccgccgtgcgcgagtacacccgcctcctccgcgcccatccccagctgcgctgcgacccggtccccgcgacgccgtgccacgtgagagccggcgtgcccccgggggagctgctgttcgggccagcgtgggcgagcatcctctgccccccaccctccccttccgcctgcgcgaccacggccgccgccgccgccgccgccgccgccggagcgtcgcggcccgccgtacccacgcggcagcagctgaggggcatgagggacgtggtgaaggccatcaaggagtaccgagcgcggacccgccaggcgtacgaggctgccaagaaagaggcggaagcgaggggagagcaggtcaggtgcggtccgccgcacttccattggggtgggaggctcgaggtggaagtggatggggcgggcgcctatcaccagtcgagatactggcgctag

SEQ ID NO: 4615 - protein, 898 aa, Myceliophthora thermophilia
MEHTRRTADAVVDLPSYRAATTRPDWLALVAPYVRINDYARLCLVSRHFYRQFAPRLWNDPLAVMHPGCLIRFMRHVKTRVRATTPGNLVRSFDTRWVSQSYDYAVFAHAGVGGAVPLSSLLLSIASGFPRLRCILLDGYPNLAHEPPGSPLAPDRLPPFEPPFEPPFEPPLLLSTARCQVALPPSFFASPYLKRLVYLDVSDMPGSLRHPLAQRTLSPANLPGLRILKLRGREMDDATATLLFKTFGEQLWSLDLSRNKLTGDALDALNQFSFPSQTSRTDHYSVEGRIAWLLTGSPSFGTFCTVTESEWSADFSHPHRHIADPPCYIAPGEAGPHPTIAPRLDGRVKILPDSADAVKAMLSGGVGSHSPPLESVQIADVCRAPHGITHLYLSSNKVSAEGLSRTIRSSPGQLQRLECDSVSFKLPDAAPPSWLSKARLSGALGCAHLFRPVFSANLQVLRIHHSVVTQLLTLSLDRLSPMANMWVAETQLLPRAELAYPEAFVPDMNPRLQSLVLTRIPRYSTGPLIDKLIAFLNLASIQERAIQDTKSASRHGPVTLLGLRHIRLEFDPDPLEDLSRDSFGLELGFDAAAVMEDATKEFSFFGDSGWSSVLSTDKAASRATPPNDPESEPNPRGSESEPTRISQSARSHPPHPPSSVHAPAPVAPATACPDETSVFPRHPDHHHHDSPERPKRQLNHVRIPHSWTWHKGATPLSALVWAGYSSDRQEEEGAGGEGGEEGSGDRDDGSAPPAVREYTRLLRAHPQLRCDPVPATPCHVRAGVPPGELLFGPAWASILCPPPSPSACATTAAAAAAAAAGASRPAVPTRQQLRGMRDVVKAIKEYRARTRQAYEAAKKEAEARGEQVRCGPPHFHWGGRLEVEVDGAGAYHQSRYWR

SEQ ID NO: 4616 - DNA, 1689 bp, Myceliophthora thermophilia
atgcagcagcagtatcgcggatacccgccccagcatgtgcccccgaggggaggaggacagcatgtcccacaacgccgaggcggcatcgacttgcaagcctccaaaacctggcgcatcacggatcgcatgtcccaaatggcacaaaaccgccaagcgcgaggccaacagccttcttcatcacggaacccgcagtccctgacgctaaccatgacaggccccatgatgtcggccggccctcaccactcggtgcccatgacgcaggcgcagatcaaccagcagcaccaccagcagcagcaggccaaccacctcgcgaagctgaggagccgcaagcccaccgacaagaacctgcccgacggtgttgaagaagccctggcagcaggcagcgatgtcgccacctcctacaagcaactccgcgacctggagaggcggctcgatgcgaccatgacgcgcaagaggctcgacattgtcgactcgctgagccgcaacacaaagcggtacaagacattgcgcatctggatcagcaacaccgtggaggaccagttctggcagaataacggcctcaacgttgacacgttcgacttctcgtccaacctcgagtcctcataccgtgttaagatcgaggggcgcctcctcgacgatgaatgggaagcagaggtagaagaggaggagcgcaagggcagtgacgacaatcgcaacaacagcagcggtaacagcaacgagacagacggcgacaagatggagacagattcgcccagcaaaaccaaagcgaagcccgcgcccaccaagagaccgcggctgtcgcatttcttcaaggcgatcacagtcgagtttgatcatccgaagtcgggccgccagggcgccgagactaccgtggaatggaagaagccggacaggccgccagccggggccggcaatttgcccgccatggccgacttcgacgagttcaccttcaaacgcaacggcgacgagaacgtgaacattaccatcaacttgtaccggcacgaagatcccgagcgcttcgagctggcgccagcgctggctgaaattgtcgacatgcgcgaggcgacccgccaggaggcggtcatggcgttatgggagtatatcaaactgatgaacctgcaagaagacgaggagaaacgcaatttccgctgcgacgacttgctcaaaaaaatcatcccccgcgaaaccggctacatcccccacctcaacgactacatcacccctcacctgcgccctctcccgccggtgaaactggcctatacgatccgcgtggacgaggagtttcacaagaacccgcagccgaccatctacgacgtgcgcgtcgctgtcgacgacccgctccgcgcccgtctgttgcccttcatccagaatccgcagtacgccgccatgctcaaggaggtcgcggggctcgacgaccagctggcgacgctgatccaggccgtcgcgcactccaaggccaagctggacttcctgacgtccttgtcgaaggatccggtgaacttcgtcaaggggtggttgagttcgcagaagagagacctggaggtcatcatgggcgaggcgacccgcgggggcggagaggatgctgctggtgatgaatggcgccgcggtgggccaaatagcgtgtgggccacgcagaatgccagagagagtgtcaatgtcctcctggcgaagcagccggcgagggtgtaa

SEQ ID NO: 4617 - protein, 562 aa, Myceliophthora thermophilia
MQQQYRGYPPQHVPPRGGGQHVPQRRGGIDLQASKTWRITDRMSQMAQNRQARGQQPSSSRNPQSLTLTMTGPMMSAGPHHSVPMTQAQINQQHHQQQQANHLAKLRSRKPTDKNLPDGVEEALAAGSDVATSYKQLRDLERRLDATMTRKRLDIVDSLSRNTKRYKTLRIWISNTVEDQFWQNNGLNVDTFDFSSNLESSYRVKIEGRLLDDEWEAEVEEEERKGSDDNRNNSSGNSNETDGDKMETDSPSKTKAKPAPTKRPRLSHFFKAITVEFDHPKSGRQGAETTVEWKKPDRPPAGAGNLPAMADFDEFTFKRNGDENVNITINLYRHEDPERFELAPALAEIVDMREATRQEAVMALWEYIKLMNLQEDEEKRNFRCDDLLKKIIPRETGYIPHLNDYITPHLRPLPPVKLAYTIRVDEEFHKNPQPTIYDVRVAVDDPLRARLLPFIQNPQYAAMLKEVAGLDDQLATLIQAVAHSKAKLDFLTSLSKDPVNFVKGWLSSQKRDLEVIMGEATRGGGEDAAGDEWRRGGPNSVWATQNARESVNVLLAKQPARV

SEQ ID NO: 4618 - DNA, 933 bp, Myceliophthora thermophilia
atgccgtcgttcgatcgtgtctacgcttcgtcgccggttcttgccataccggcacagactgcccatccggtctcgctcgacaagtccttcctgcagcaccaaattctgcccttgagtcaaccggcgtcgtggcgcccccaactagtccgcacctgcacggctgccggccgtaaacggtccagagatgaggcatccgtcaacctcgaccctccagagaagttggttgagctgccagtcaaagaacgggaggatgaatgggtctacggccccggcatgacgctcatcaagaagtcggctggctacgtcgccgacgcgagcaaccagtctggaacttggctcgaagaacgggttgccgcggaagaagcacgtaagacagaagcggctcttcttgcgcaacaacaattggcgcagtcgcggccctctctgaggagccacaagtcgcaacggcttgacatgacgacgacgtccatcagctctgatggtatgctttccggttgccgctctagccccactcgcgaagccatcaacccagtgaccgcatcttcggattcacttgcgcaaccaatcgtcgacgattttactctgcacctcggcattggctggagccggatcagcgacaacgaacacattcaagccgccgctcgtggttgggcccgcttcatcgagaatcattatcccgtcaccaacgccaagatcctcctggaaagccgcggcctccagtcgtatctcgtcgaagcaactgaaggatacttcttgttcgcggagaaccttcgccagggccggctcgtcagcacgacttcagaaggcgctctcgacaatctcaaggtttcgccgcccgtatttgacggactcgaaattatgaatgcctccgcatcggccagatccctcgattcgatcgcgtctaccacgtcggctgatatcgacatgagctag

SEQ ID NO: 4619 - protein, 310 aa, Myceliophthora thermophilia
MPSFDRVYASSPVLAIPAQTAHPVSLDKSFLQHQILPLSQPASWRPQLVRTCTAAGRKRSRDEASVNLDPPEKLVELPVKEREDEWVYGPGMTLIKKSAGYVADASNQSGTWLEERVAAEEARKTEAALLAQQQLAQSRPSLRSHKSQRLDMTTTSISSDGMLSGCRSSPTREAINPVTASSDSLAQPIVDDFTLHLGIGWSRISDNEHIQAAARGWARFIENHYPVTNAKILLESRGLQSYLVEATEGYFLFAENLRQGRLVSTTSEGALDNLKVSPPVFDGLEIMNASASARSLDSIASTTSADIDMS

SEQ ID NO: 4620 - DNA, 3240 bp, Myceliophthora thermophilia
atgtcgatcgactttccgaaggaggaggaggccatcatcgccagatggcgcgagatcaaagcctttgagcgacaggtcgagctctctaaagggaacccgaattacacctttttcgatggaccgcccttcgcgactggcctcccccattacggccatttgctcgcctcgaccatcaaggacattatcccgaggtactggtccatgaagggctaccacgtcgagcgccgtttcggctgggacacccatggcctacctatcgagcacgaaatcgacaagaagcttggcatttcgggcaaggctgccgtcatggagttgggcttggaaaagtacaacgccgagtgtcgggctattgtgatgaggtaccgtgaggaatggaggcacacgattgaacgcctgggtcgctggattgactttgataacgactacaagaccatggaccggacattcatggaatccgagtggtgggtgttcaagcagatctttgacaagggccaggtgtatcaagggtaccgcgtgatgccctactctacggccctcacgactgccctgagcaacttcgaggccaaccagaactaccaagacgtaaccgacccggcaattgtcgtctccttccccctcaatgatgatcccgaaacgagctttctcgcttggacgaccaccccgtggacgctgccatcccacctggccctagcagctcacccggactttgagtacatcaagatccacgacgaaaagtcggggaagaactacatcttgctggagaagctccttgggaccctatacaaagatcccaagaaggccaagttcaaggtgcttcagaagttcaagggcaaagagatgcttggatggaagtaccagccaccgttcaactacttttacgaagagtacaaagatgtcgcgttcaagctactcaacgcgacgtacgtcaccgacgacagtggtaccggcattgtccaccaagccccggcgttcggtgaagacgattacaacgttgctgttgaaaacggcatcgtgaccgagaaacgcccacctcccgatccggtggatgatgccggccggttcaccagcaaggtgtcagactttgcgggcatgcacgtcaaggaggccgacaagcacatcatcaagcacctgaagaactctggtaggctggtcgtggagtcacaattcaagcactcgtatccaatgtgctaccgctccgacacgcccctgatctacaaggcggtgccatcctggttcgtgcgcattcctgagatcatccctcaaatgcttaagaacattgagggctcccactgggtcccgtcattcgtcaaggacaagcgcttcgctagctggatttccaatgcgcgcgactggaacgtgtcccggaaccggtattggggtacccccatcccactctgggtgagcgacgacctagaggagcgtgtatgcgtgggaagtatcgccgagctcaaggagctcagcggctacgagggtgagattaccgacctccaccgcgacaagatcgaccacatcaccatccctagcaagcaaggcaagggcactctgaggcgggtagaagaagtgttcgactgctggtttgagtctggaagcatgccatacgccagcaagcactatcctttcgaaaatcaagagcagtttgcgaagtccttccctggcgacttcatcgccgagggcctcgatcagacgaggggctggttctacactctgttggttctcggcacgcacctcttcggtgtttcacccttcaaaaactgtgtcgtcaatggcatcgtgctagcagaggatggcaagaagatgtcgaagcgcctcaagaactacccagatccgaacctcatcatggccaagtacgggtctgatgcgctccgtctgtacctcatcaactcgcccgtggtgcgcggagagcctctccgattcaaggagtcgggtgtcaaggaggttgttgctaaggttctcctccccctgtggaacagttacaagttctttgaaggccagattgccttgctcaagaagatggagaatgtcgattacgtgttcgacccgagcatggagtcgtcgaataccaacgtgatggataagtggattttggctagctgtcagagcttgctcaagttcgtcaatgaggagatggcggcttaccgtttgtacacggtcgtgccgaagcttcttgaactgatcgacaacacgacgaactggtacatccgattcaaccgcaagcgtctcaagggtgagaacggtctcaacgacaccctccacgcgttgaacaccctgttcgaggtgctctttactctctgccgcggcctcgcgcccttcacgcccttcctcacggacaatatttacctacgattgctccctcatattcccgaacacctccggggcccggatcccagaagcgtccacttcctgcccttcccggaagtgcggcaggagcttttcaatgctgaaattgaacggcgagtgcagcggatgcagaaggtcatcgaactggcgcggtactcccgcgagaagcgaaatatcggcctcaagcagccgttgaaaacccttattgtcattcaccatgatcctcagtatctggaggacgtgggatcgcttcaaggttatatcgccgaggagctgaatgttcgcgatctggttttgacctcggacgaggccaaatatggggtgcagtacagtgttacggcggactggccagtgcttggcaagaagctcaagaaggatatggcccgtgtcaagaaggctcttcccaacgtcacaagtgaggaagctcatggctatgccaccaccggcaagcttgttgtcgacggcatcactcttactgaaggtgatctggttgtcaagcgtgggctcaaggaggacgactcctccaagaacctcgaaaccaacacggacaatgatgttctcacgatccttgatgtcgagatctaccctggtttagccgaggagggtcttgcccgtgagatcatcaaccgggttcagcggctacggaagaaggcgggcttacagccaacggacgacgtcaagatggagtaccaggtcctgtctgacccggagcagaccggcatcgagaaggtgtttgagacgcataagccgaccattttgaaggcgctgcggagggcactagataagcacgaggcgacgcatgtcgacggccaagtttcggacaagaaggaggagggtctcattgcggaagaggaacaggaagtgggcaaggcgaccttccttttgcggctgttgaagttgtag

SEQ ID NO: 4621 - protein, 1079 aa, Myceliophthora thermophilia
MSIDFPKEEEAIIARWREIKAFERQVELSKGNPNYTFFDGPPFATGLPHYGHLLASTIKDIIPRYWSMKGYHVERRFGWDTHGLPIEHEIDKKLGISGKAAVMELGLEKYNAECRAIVMRYREEWRHTIERLGRWIDFDNDYKTMDRTFMESEWWVFKQIFDKGQVYQGYRVMPYSTALTTALSNFEANQNYQDVTDPAIVVSFPLNDDPETSFLAWTTTPWTLPSHLALAAHPDFEYIKIHDEKSGKNYILLEKLLGTLYKDPKKAKFKVLQKFKGKEMLGWKYQPPFNYFYEEYKDVAFKLLNATYVTDDSGTGIVHQAPAFGEDDYNVAVENGIVTEKRPPPDPVDDAGRFTSKVSDFAGMHVKEADKHIIKHLKNSGRLVVESQFKHSYPMCYRSDTPLIYKAVPSWFVRIPEIIPQMLKNIEGSHWVPSFVKDKRFASWISNARDWNVSRNRYWGTPIPLWVSDDLEERVCVGSIAELKELSGYEGEITDLHRDKIDHITIPSKQGKGTLRRVEEVFDCWFESGSMPYASKHYPFENQEQFAKSFPGDFIAEGLDQTRGWFYTLLVLGTHLFGVSPFKNCVVNGIVLAEDGKKMSKRLKNYPDPNLIMAKYGSDALRLYLINSPVVRGEPLRFKESGVKEVVAKVLLPLWNSYKFFEGQIALLKKMENVDYVFDPSMESSNTNVMDKWILASCQSLLKFVNEEMAAYRLYTVVPKLLELIDNTTNWYIRFNRKRLKGENGLNDTLHALNTLFEVLFTLCRGLAPFTPFLTDNIYLRLLPHIPEHLRGPDPRSVHFLPFPEVRQELFNAEIERRVQRMQKVIELARYSREKRNIGLKQPLKTLIVIHHDPQYLEDVGSLQGYIAEELNVRDLVLTSDEAKYGVQYSVTADWPVLGKKLKKDMARVKKALPNVTSEEAHGYATTGKLVVDGITLTEGDLVVKRGLKEDDSSKNLETNTDNDVLTILDVEIYPGLAEEGLAREIINRVQRLRKKAGLQPTDDVKMEYQVLSDPEQTGIEKVFETHKPTILKALRRALDKHEATHVDGQVSDKKEEGLIAEEEQEVGKATFLLRLLKL

SEQ ID NO: 4622 - DNA, 417 bp, Myceliophthora thermophilia
atggccaaggtccgcgcaaacgtttcgtcctcgaggcgcaagtctcgcaaggcgcacttcaccgcgccttcgagcgtccgccgcaacatcatgagcgcccctctcagcaaggagctccgtgagaagtacaacgtccggagcatccccatccgcaaggatgacgaggtccagattgtccgcggcatcaacaaggacaaggagggcaaggtcacctcggtctaccgtctcaaatacgtcatccacgtcgagcgtgtcacccgggagaaggccaccggccagagcgtgcccgtcggcatccatcccagcaatgtcgttatcaccaagctcaagctcgacaaggaccgtgagaatatcctggcccgcatcaaggccggccgtgagcaggctgccaagtccaagggcaagagcaaggcttaa

SEQ ID NO: 4623 - protein, 138 aa, Myceliophthora thermophilia
MAKVRANVSSSRRKSRKAHFTAPSSVRRNIMSAPLSKELREKYNVRSIPIRKDDEVQIVRGINKDKEGKVTSVYRLKYVIHVERVTREKATGQSVPVGIHPSNVVITKLKLDKDRENILARIKAGREQAAKSKGKSKA

SEQ ID NO: 4624 - DNA, 1116 bp, Myceliophthora thermophilia
atgtcgttcttctttgggagaacgcgcacacggacaaacaccacagacctcgtcagacaggcaagagaagatgtcaccaaattggagggaccgcaaggggccgccaaggccgaggagcttgcaaaggtgctcgcgcagatgaagcaggtcctgcaaggcacacatgagaccgagccaaacacggagcagatctaccaattggtgacggccatgattgaagaagacctcctctacctccttgccgtccatctccaccgctttccgttcgagtcgcgaaaggacactcaggtcatcttctcctacgtcttccgcttccgcccgccgacggggccgcagaaaccggagccgctcgctctggcctacgtcgtcgagaggcgaccacaggtgcttgtggaattgtgcaggggttacgatcacaaggagagcgctacgccggcggggacagtgctgagggaggtgctgaagaacgaggcggccgcggcgataatcctgtacgacgacggcgatgaagaagggtcgagcgccaggggaataggggggatcaacccggaccggacgcagagcgggaggggagtcttttggaaatttttcgactggatcgacaagagctcgttcgaagtgagcgcggatgcgtttaccacattcagggaactcatcaccaagcacaaagagctggtccctcggtatctggccgccaacttcgatctcttctttgatcggtacaacaacgtgctggtgcagtccaacagctacgtcaccaagcgtcagtcgatcaagctgctgggcgagatcctgctggaccggtccaactacaacatcatgacggcctacgtggaccgaggcgagcacctcaagatctgcatgaacctgctgcgcgacgaccgcaagatggtgcagtacgagggcttccacgtgttcaaggtgtttgtggccaacccacacaagtcggtgcccgtgcagaagatcctgattatgaaccgggacaagctgctgcacttcctgtcgcacttcctcgaggaccgcaccgaggacgagcagttcatcgacgagcgcgagttcttgatcaagcagatccggaatctgccacctgcgcccgtgccgccacagcagcggtag

SEQ ID NO: 4625 - protein, 371 aa, Myceliophthora thermophilia
MSFFFGRTRTRTNTTDLVRQAREDVTKLEGPQGAAKAEELAKVLAQMKQVLQGTHETEPNTEQIYQLVTAMIEEDLLYLLAVHLHRFPFESRKDTQVIFSYVFRFRPPTGPQKPEPLALAYVVERRPQVLVELCRGYDHKESATPAGTVLREVLKNEAAAAIILYDDGDEEGSSARGIGGINPDRTQSGRGVFWKFFDWIDKSSFEVSADAFTTFRELITKHKELVPRYLAANFDLFFDRYNNVLVQSNSYVTKRQSIKLLGEILLDRSNYNIMTAYVDRGEHLKICMNLLRDDRKMVQYEGFHVFKVFVANPHKSVPVQKILIMNRDKLLHFLSHFLEDRTEDEQFIDEREFLIKQIRNLPPAPVPPQQR

SEQ ID NO: 4626 - DNA, 1083 bp, Myceliophthora thermophilia
atgggcccggaaccgctgccgcacctcccctccgagatctggatgatgatactcgagagcctgcccccttccttcttccagcaagacatccgccgcctggccctctccaagcgctggtatagcctcgccttccccatcttctacccgcgcatcgagtacacgccgcgggtcatcagccggctggtgcaccgcaagtccaagtcgctcgaccggtcgcgcgccatgctgcgcaagtcgctgcgctgcgtcaacattgtgctcgacggggtgcccggcgatgatgccgagctcgtgcgcttcaacacgcccgccaacctggcccgcttctgcctcatgctgctcgagttccgcgagctcgacgaggtccgcttcgccgcccgctggccgaaccgcgcctggcccgccgaccccctgcagcccgactacctgtgcatccgcacgctcgagccctacctcagcctgctgacgcacgtcaccgccctggacctggacctgtgcggcaccgacatcgtcgcctgccccggtcccggtcccggccacggctacggctatggccacggacacggccacggccacggccacggcgatggcgccgccggcaccccggcgcccttctgcgagcacgtgcgccccctgctgtcgcgcctccgcgccctgcgcctgcgcatgcggagcatctgccacaccgccctcgtcccgctcgacggccgccccgtcaccctgcgggagctgaggctgagcctctcaactcgagcagacctgccggcgcgcggggggctcgcgcgagcggaccgtgcccatgaacgagatgcgcgccgccatgagggccttgatcgtcgacatggccccgtccgcccgggccgagatggtccacttggccccgacggcgagatccacgtctgggacgcgggaaccgaccgctgctcccgcgacccgtccgagaagccgatgcggttccccctctgcttcgaggccacgcactcgcgggtctgcttctcggcgcacgccgatgacttggcatctggcgatcacgccggtgttggtggagtgctcacgtccagctcggacgacatgtccaactga

SEQ ID NO: 4627 - protein, 360 aa, Myceliophthora thermophilia
MGPEPLPHLPSEIWMMILESLPPSFFQQDIRRLALSKRWYSLAFPIFYPRIEYTPRVISRLVHRKSKSLDRSRAMLRKSLRCVNIVLDGVPGDDAELVRFNTPANLARFCLMLLEFRELDEVRFAARWPNRAWPADPLQPDYLCIRTLEPYLSLLTHVTALDLDLCGTDIVACPGPGPGHGYGYGHGHGHGHGHGDGAAGTPAPFCEHVRPLLSRLRALRLRMRSICHTALVPLDGRPVTLRELRLSLSTRADLPARGGLARADRAHERDARRHEGLDRRHGPVRPGRDGPLGPDGEIHVWDAGTDRCSRDPSEKPMRFPLCFEATHSRVCFSAHADDLASGDHAGVGGVLTSSSDDMSN

SEQ ID NO: 4628 - DNA, 786 bp, Myceliophthora thermophilia
atgagcgagatagacatgaaggttgatccggcaagagcatccgctctcatctcacagcttcagagcgtcaatgtgagaatagctgcagtggccaagggccgtgcagtccgtctcgtggctgtctccaagctcaagcctgccaacgacatcctcgccctccatgactcgccactcaggcaggtacattttggtgagaactacgcacaagagttgagtcaaaaggccgagctgctgccgagaagcattcagtggcactttatcggcggcctgcagtcgggccgttgtaaggagctcgccaagattccaaacttgtggtgtgtgtctagcgtggacaacgtgaagaaggcacagctcctcgacaaataccgaggcgagaagatcaaggccgagccagagacgccgaaactcaacgtccacgtccaggtcaacacctcgggcgaggagtccaagtccgggtgtgcaccgggcgaagacgtcgtgtcgctttgccgggccatcgttaacgattgccccaacctgcatctgctgggcctgatgaccattggtgccatcgcccggagcgtggccacgacggcggagaacgagaacgaggattttaggctgctggtagagcagagggacctggtggcgaaggagctggggctggagagggagctggagctcagcatgggcatgagcgaggactttgagggcgccattgttatggggagcagtgaggtacgcatcgggagcaccatcttcgggcagcgaccggccaaatcggaagccaagattgtttcatcatag

SEQ ID NO: 4629 - protein, 261 aa, Myceliophthora thermophilia
MSEIDMKVDPARASALISQLQSVNVRIAAVAKGRAVRLVAVSKLKPANDILALHDSPLRQVHFGENYAQELSQKAELLPRSIQWHFIGGLQSGRCKELAKIPNLWCVSSVDNVKKAQLLDKYRGEKIKAEPETPKLNVHVQVNTSGEESKSGCAPGEDVVSLCRAIVNDCPNLHLLGLMTIGAIARSVATTAENENEDFRLLVEQRDLVAKELGLERELELSMGMSEDFEGAIVMGSSEVRIGSTIFGQRPAKSEAKIVSS

SEQ ID NO: 4630 - DNA, 858 bp, Myceliophthora thermophilia
atgctgatcaaagagagctttgccgacgtgcagaccaccgccaatggcaaagagagctcgatgactaatgaaaagcgctatcaaggaatttttgtgttccacccgaccatccccggatatcccaacgcatggcgggtcggtggcggcatagtgacgggccctgttgctcggtttgcgaggcagatcgcgggccagggctacattgtcgcagctcccagcagctaccatgattttaccggccccgaacccctggcgtacgacgtgccgggaacagaccagggaaacaagtggaagataaccaagaccctcgaatcctacgatgaagactccaaccgaacggtcgattaccttctctccctgcccacctgcaccggccgtatcggcgcgaccggcatgtgcctaggcggacacctcgccttgcgcgccagtctcgatccccgaatcaccgcctcggtctgctacttcccgaccgacatccacacgcgcacgctgggaccctatacggcgcccaactcgtcggcgaccgccccctcgcccgacagcccgcacacgatcgaccagctgtcgcgcatccgcggcgaggtggcgctcatcttcggcgtcaaggacacgcacgtgcccgacgccgggcgcgacctgatccggctcaagatgcgcgaggccggcgtcaccttcagcttccacgagttcgcctgggcccagcacgccttcatccgcgacgagctcagcaagggccgctacgaccccgccgtgagcaaggcctgcttcgaggtgctcctcgagctgtttggccgcgtgctcaggaccgagctcggggagaaggacggcggcccgcaggagatcgagcatgtttgctga

SEQ ID NO: 4631 - protein, 285 aa, Myceliophthora thermophilia
MLIKESFADVQTTANGKESSMTNEKRYQGIFVFHPTIPGYPNAWRVGGGIVTGPVARFARQIAGQGYIVAAPSSYHDFTGPEPLAYDVPGTDQGNKWKITKTLESYDEDSNRTVDYLLSLPTCTGRIGATGMCLGGHLALRASLDPRITASVCYFPTDIHTRTLGPYTAPNSSATAPSPDSPHTIDQLSRIRGEVALIFGVKDTHVPDAGRDLIRLKMREAGVTFSFHEFAWAQHAFIRDELSKGRYDPAVSKACFEVLLELFGRVLRTELGEKDGGPQEIEHVC

SEQ ID NO: 4632 - DNA, 1362 bp, Myceliophthora thermophilia
atggcccagcctgcgaaagcattcgtaggtcccatgattcattccctcccggcgtccgaaatcgaggtactcccttatgctctgcttgcagtcaacagtgaggggaagattacctccctccttcgggacgtcaacccacagcgggcgcaagacgcgcttaaagctcttaactttcccccggaattagtcacgattcattacctcggtccgggtcagttcctcatccccggtttcgtagacacgcacaaccacgccccgcaatgggcgcaacgcggcttgggtcaggggatgcacatcctcgactggctcgacgccatcaccttccccaacgaggcccggttccacgacccagagtacgctcgccgcatttactccagctgtgtcgacggttttctccgccagggcatcacgaccgcctcgtactacggctccatccacggggaggccaccaagacgctggcccgtctctgcctggaggagggccagcgcgcgctcgtgggcaagtgcaacatgacgcgcaacgcacccgagtactaccgcgacgcgtcggtcgaggatagcctgcggctcaccgaggagtgcatcgactacgtcaggtcgctggatcccgcgggcaacctcgtcaggcacgtcctcaccccgcggttcgccatctcgtgcgacgccgaggtgctgcgggggctcggcgacattgcgcgcaacaacccggacctcccgatccagacgcacttcaacgaggccgaacaggagatgaaggcgaccagggagctattcccgcagttcgcgagcgaggccgatctgtacgagcacttcggtctgctgggcgagcggtcgatcctggcgcactgctgccacatgaccgactacgagatggagcgggtcaaggcgttggggtgtggcgtcgcgcactgccccatatcgaacatgaccgtcggcggcggcttcatggccgcccccgtccgggagttcctgcggcgggggatcaaggtcgggctgggcaccgacagcggcggcgggttctcgagcagcatcctagacgcgatgcgccaggccatgatcgccagctacgcgcgcgaggtcatgtccaagggacaagacaagggcttgtccgtggatgaggtgttctacctggctactctgggcggtgcccaggtctgcggcttgggtgacaggattggaaatttcgaggtgggcaaggactttgacgccatcgtcgtcgggactcaggggagcgaacagggaatcatgaccgtggtggaggaaaatgatagcctcagaaccgtgtttgaaaagttcatcatgacgggggatgacagaaatctcatcaaggtttatgtccagggacggccggtaaagggttaa

SEQ ID NO: 4633 - protein, 453 aa, Myceliophthora thermophilia
MAQPAKAFVGPMIHSLPASEIEVLPYALLAVNSEGKITSLLRDVNPQRAQDALKALNFPPELVTIHYLGPGQFLIPGFVDTHNHAPQWAQRGLGQGMHILDWLDAITFPNEARFHDPEYARRIYSSCVDGFLRQGITTASYYGSIHGEATKTLARLCLEEGQRALVGKCNMTRNAPEYYRDASVEDSLRLTEECIDYVRSLDPAGNLVRHVLTPRFAISCDAEVLRGLGDIARNNPDLPIQTHFNEAEQEMKATRELFPQFASEADLYEHFGLLGERSILAHCCHMTDYEMERVKALGCGVAHCPISNMTVGGGFMAAPVREFLRRGIKVGLGTDSGGGFSSSILDAMRQAMIASYAREVMSKGQDKGLSVDEVFYLATLGGAQVCGLGDRIGNFEVGKDFDAIVVGTQGSEQGIMTVVEENDSLRTVFEKFIMTGDDRNLIKVYVQGRPVKG

SEQ ID NO: 4634 - DNA, 372 bp, Myceliophthora thermophilia
atggctaggaacgaactcgagaaccgcgaaaagtactcgcagaagttggttaacgaggcctacgccaaaatcgaggcactcgagggcgccaaagcgaagcgtatcaagatcgaaccacctggcaaatacggaggaaccaaggaggatctcgtaggattcttgacaaatctccgatcctacttccggcttaacgacgacaagttcccagacgaaaaagccaaagtcctttacgtagccacgagactagagggcaaggcactcagatggttcgagcctacatggaacgactatctcactaaggaagacgaagacgaccgagacgcagagaacagctatcggcggtttagctcgttcctcttgttgcgatattga

SEQ ID NO: 4635 - protein, 123 aa, Myceliophthora thermophilia
MARNELENREKYSQKLVNEAYAKIEALEGAKAKRIKIEPPGKYGGTKEDLVGFLTNLRSYFRLNDDKFPDEKAKVLYVATRLEGKALRWFEPTWNDYLTKEDEDDRDAENSYRRFSSFLLLRY

SEQ ID NO: 4636 - DNA, 7776 bp, Myceliophthora thermophilia
atggatgaagcaaagtacagcggcagagtgggagaccagccagacgacatcgccatcgtgggctacgcttttagactgccccaggatgtggatgacgatttcaccttctgggacgtgctgcagaagcgacgcaatctgagaacggactggccggcatcccgcatcaacgccgatgcattcaaattccaccatggcaaaggcgcgcattttatcaatgaggacttggccgcttttgatgctcccttcttctcgctcacggccaaggaggccgcggccatggatccgatgcagcgctggaccctggaaacctcatatcgggcttttgagaacggtgaggctggaatgccggcagaggccctcagaggctcccgcactgccgtgttttcggcctcgatgctggaggactacgcaaggatgacggccatggacccggacaacacggagagaacagccgtgacgggcagcactgttgcgtgcgtcattccgaatcgtgtcagctggtatttcgacctgcgcggtcccagtatccatgtgaacacggcttgctccagcgcgctgtctgcagtagatatggcttgtaagaatctgcaagcaggagattcctcgtgtgcgctcgtaaccggggcgaacctgctcctcgaccccggcgtattccaggtcctgtcgaacggcggctttctgtctccggacggcgtatgccatagttttgaccaccacgccaacgggtacgccaggggcgagggattcgttgctttggtgctcaaaccggtgaccgcagccgtaagagacggcgacgtggtccgcgccgtcatccgggctgttggctcaaatcaagacggcaacacgcccgtgctcacgcagcctagtgcccaggctcaagaggacttgatacggcatgtctacgcgcgagccgctctgccgtttgatcagacgcgctacgtcgaagcccatgggacgggaactcgagtcggtgatcccatcgaggtccgagccattggccgggtgttccgagacttccgctcagcggaagagcccatgtttgtcgggtccgtgaaagcaaacgtcggacatctagaaggcgccagcgccttggccagcattgtgaaggccattctgattctcgaaaagggaatcatccctgggcagccgctcctcgagaagctcaacccagacattgacgctgacatgcaccacatcatggtccccttggaagacacagtgtggccaagcccggggcttcgtcggatatcggtcaactcgtttggttttggaggatccaactcccacgccatcctggacgacgcattgcactacatgcaggaaaggggcctccgtgggaatcattgcactgtttccgatcctctcgtctccaacaacacagatgtgcaggcgcgcgctgtcaacggagtaaacggagaagccaccaggttaccgaaacttctggtgtggagcgccgctgacgagggggcactcaaccgcatgatccaggcatacgagtcctattacgaggacagagtcgctggtgaccccagccagctcgacagactggccttcaccctggcagcacgacggagccgcatgctgtggagggccttttccattgttaacgatggcgcagagacgacgagcctgacacggcccagcaaagccacccggagttcggctgaggtcggcctggcatgggtcttcaccggacagggcgcacagtacgcgcatatgggttatgatctttgccggtattccgtcttccgccggacgctggagcaagtcgacggcatataccgcggcttgggcgcggaatggtcattgttcgacgagctgcgtagctccgagaacattgataagcctgaatacagccaaccgttgaccacggcggtacaggtggcgcttgtcgagttgctgaggagctttggcgtcagccctaaggctgtcgtcggtcactcctccggggaagttgcggccgcctatgccattggcgccttatctctgccatcggcctgcaaagttgccttcttccgcggactgctggccggaaagttgcgcgccgcaagcgcctgtacccctcaggccatgatatccgtaaacctctcagaggcccaggttccagattacctctccaagactgagttgtcaacggaaaatgcgctgtcatcggtatgcgtcgcctgcgtcaacagcccgctcaactgtaccttgtcgggcccggaggcagccatcgacgcgatcaaggcgcaagccgacagggacggcatcttcgcacaaaagcttcggactgcggttgcttaccactcgccatccatgcttgccattgcaggcgagtatctgacattgatgggacatctcgagggcgctgcggcctcgaaagtctccggtgggatcacaatgatgtcctcggtcactgggaaggaggtccggccgaccgaattggccaagccacagtactgggtcagcaatatggtgtcgacggtccgcttctccgacgcagtgcgcgcacttctcgacaaattcgattcaaccatcacggacttagtcgaggtcggcccacacccagcactgcgccgccccgcacgagacacggtgggcaaggagcagcagatccggtatgccggtgtcttggaccggtcccgtccagcaaccgagaccatgctggagctcgtcggccagctcttttccttggggcacgccgtgtccataccctcagtcaaccacgagaaagccaagccggctccccggcccctcgtcgactgtcccgcgtacccattcgaccattcccatcgctactgggccgagtcgcgtcttagccgggacttcaggctgcgagggacggttcagggcgagacactgggaatgcgcgcgtcagactggaacccgttggcgccaaggtggaggaatttcctcagcgttgagtcctcgccttggctgggacaccataaaatcagcgacacggtgctttacccagctgccggcatgctcatcatggccatcgaggcggcgcagcagcagacggctcacggtgaccgcacagtgatgggttaccagctagaacaggccaacttcctgaacccgatcattgtgccagaagcgtgggaggacaggatagagacgcaagtgcagctgcagccggcgaggaagaaggagaacagcttcgatgtctccatattctcatactcctcccgcggcgggcagtggtccgagtgcttccatgcccggatcacagtggagtaccaaggcgaaggggccgagggagagcacaaacgtgtcgccgatgaagccgcgcggacccgccaggcggacgccgagagacgttgcaggctgcccctcgacccggaagtcttttaccgtgacgcgtcggaacacgggctgcaatacggagactggtttcagctgctccgggagatccgctgggacggccggaagactgccgtggcgcgagtcgacttgtcgagacagagataccggagcgagagcctggtgcacccggccctgctcgacacagccttccacgtgctgcgcgccagtgcgggccagcagccagccgccaacgtccctgttcgtctggaaaaggcgtggttttcggccacgggctggcagcatcccggcaatggtgaacttaggtggttggccacttccagtcgtgcgatccgtgacactgacaggcctaaccgccttggtgaagatggcactctccaagcgctcgcagcggatgggaccgtcctatgcaccatcaagacggccgtgacagcgcccgtctccaagactgcagaaggggagaaaggaaacaaggagaagaagctcctgtacagcatggaatggaagccacagctgagcctgctcgagccggagcagctggcacgcgtgtgtcacgtccatttctccgcgcgggacgagacggcgatcgtgagcaaccacgccaagctgtgtgccgctctggacctcgccgccgtgcgcactctcaagcacatggaccgctcgaagataccaaagaaccacctcctccggcacgtcgattggatggaacaccacgtggccaccctgcccgcggcgcggaggcaagaaggggagaccatcagcgacgccgacctggagacacgtctgcgcgaggtcgaggaagtgcttcctgcgtggaagctgtacacggcgtgtgcgcggcagctgggcagcatcctggccggagaggcggacccgctgcaggttgttttcgagtcggagctggccaacgtgttctacgccaacctgttcctgaacctgtgcgccgacgggcggcttgccgcattcttggaactcgcatcccacgagaacccggccatgcgcatcctcgaagtcggagccggcacgggcggcatgaccggccacgtcctgaacgcgctgcaggcccgcgaagcccgcacgggggcgcccagctttgccgagtacaggtacacggacatctcgcccgtcttctttgagcgggcccgcaaccgctggccggatctgcaccaacagggccgcatgaccttccaggcgctcgatctggatcggccggtcgacactcagggcctcgaggcaggttcctacgatatgattattgccgccagcgtgctgcatgccactccgtacctggaggccaccctgcgcaacgtgcgtaccgcgctgaagcccggcggccgtctcgtgctggtcgaggtcatcaaccccgccgatgtggccaccaacttcatggccggcctggtgcccggttggtgggttgcccaggaggaatggcgaccgcactctgcggcgatcaccgagcccatgtgggacaagctgctccgcgccaacggcttctccgggaatgacatgctgctgcgggattacgagagcgaagagtgccacatcatgagcgtcattgtgtccacggcgcgggagccggccaagatgcagaacgccccaagccgccgtgttgtcctcgtcgtggatgaaacgccgtcggaccagcaaatgcagctcgcgggtctcgtgggcggcctgctcggccccggctccggctccgggtggcagacgcccacagtttgcccattcgcccgcgacgaactctctcgtgcactcacgggtctaacagaagacgacgtcgtgatctgtctcgtcgaggtcgacaacagaccgctgcttgccaatctctcggagcaaagctacgcgtgtctgcaacagctcgtcaagggcgccccgagactgctatgggcgacggcaccgagtgcggctgacgatccgctggcggcccactacggtgctgtgcagggctttctgcgctccatccgggccgagcagtcgagcagccggttggtgagtgtggcgatcgaggactgcagcgatgacgcgacgtgtgcggatttgattgcccgggcattccgggccgcattcgagccctcgccaccgttgggcgtggcatcgaaagaagtcgagtatgtcgtgcgcgacggtctgctgatgacgggtcgggctgtcgagaacgtggctgggaacgaggccctgcgatccctcttacagccgcacacccagaaggttgcgtgggcagacgccccggcattgcagctcccaatgcacacctctggtaacgacgagctcctgtcgtttgtccaggatatcacacatgaccccgaggcggagatcggccccgacgaggtcgagatggaagctaaagcgtggagtctcagtcaagacagccttgataacgtagtcgcaacccggatctcggacgacgactccctcggaaccgacgagcgaatgccgcggtctggcaccggctgcgccggcatcatcacgcgggtgggccgcaacgtcgacaagtccctcctccggccaggccaacgcgtctgcatgctgcttccaccgggcgaagggatgcgcaagtacacacgcgcccaccacacggccgttaccaagctgccgcctgctggcaacctctcgtttgaaatcggcgcagcctccctggtcccggccatgaccgcgtaccacgccctcatcgacgtcgcacgcctgaggccgggcatgacggtgttgatccaccacgcagccggcgccacggcacagatggctgtgcgtatggcaagagcccacggtgccagccgcgttcttgctactgcgtcatcgcccaaggagaagcagtttgtgctcgacaccttgggtctcccagccgaagacatctttctcgcccgcccggctgcggcattcgcatctggagtgagagccgcaacacaaggagcaggtgttgacgtcgtcttcaataacgccttcctcggcgatgacgcgctgctagcttcgtgcgagtgcttggcacggggcggctgcttcgtggaggctggccgcgccaaccttgactcgggcacggcactgcccatgtcggtgttcgccaagaatatctctctttcagctgcccacttgagcgacttgagccacgatgctgttgctgggctcgccgcgagggtcatggagcttttggaccagggcagtgtccagccgccccagccgctgcgcgtgtttgacgtgtctcaggccaacgaggctgtcaagcatgtcaagactactgaggcgctgggggagtgtgtcgtcatccgcccaagagatcaggacatggtttcgtaccacgaaaaggaagagcggaactggatgttcgaccagcgggggtcgtacctcatcgcgggaggatccggcggcctgggtcgggcaatcgtccgatggatggcggaccgcggagccaagcacatcatcatagcgtccagatccggggccacgtcggaggctgctcgcgacctgctggctgatctcggagctaggggtgtcaacgtggtggcaatgcagtgcgacgtctcctccgaatcaagcctcgcaggcatgctcgaggagtgcactcgccgcagcatgccgccgatcaggggctgcatcaacgcagccatggtcctccaggacgccatcttccaggacagcatgaccttcgcccagtgggatctcaccatgcgcagcaaggtgcaaagttcgtacaacttgcaccgcctcctgccgcaagagctcgacttcttcgtcctcctctcctcccttgccggagtggttgggcagatgggcagcgccaactacgccgccggctgcgcgttccaggacgcactcgcccggcatcgcctcgcccacggccagcgcggcctctcgctagacatcggctggatgaagaacatcggcatcatcgccgagacgagcgcataccaacgccagcgccagcggctcgaagacatgcagcctatcgacgccggcgagctcctcgcagtactaacgctagccctggacccggccctcccgcttccgatgccactccacgcccagccggggcagcttcttttcgggctgcggacgccggccgatctgttggctcaggggcgtgcggtgcctgccctgctggaacgcccgctgttcgccgccttttctcaccactcgacttccgttacggcggagtcttccccgtcttccgtcaatgcgagtgcgcccgatgacagcgtgctcttccgccaggcggcagtcgggtcgcgcgagcgctcgatgattgtgcggcgggccttggccagcaagctcgcccgcgccatgttgatcgcacccgaagatgtagagccgaccaagccgctgtcagcatatggtgtcgactcgcttatggccgtcgagctgcggaattggttcggaaaggagttcggtgccaacgtggctgtctttgacattatgggaggagtgcccatcgcaaagattgcggagacggttgctgcgaagagcactttgaagtag

SEQ ID NO: 4637 - protein, 2591 aa, Myceliophthora thermophilia
MDEAKYSGRVGDQPDDIAIVGYAFRLPQDVDDDFTFWDVLQKRRNLRTDWPASRINADAFKFHHGKGAHFINEDLAAFDAPFFSLTAKEAAAMDPMQRWTLETSYRAFENGEAGMPAEALRGSRTAVFSASMLEDYARMTAMDPDNTERTAVTGSTVACVIPNRVSWYFDLRGPSIHVNTACSSALSAVDMACKNLQAGDSSCALVTGANLLLDPGVFQVLSNGGFLSPDGVCHSFDHHANGYARGEGFVALVLKPVTAAVRDGDVVRAVIRAVGSNQDGNTPVLTQPSAQAQEDLIRHVYARAALPFDQTRYVEAHGTGTRVGDPIEVRAIGRVFRDFRSAEEPMFVGSVKANVGHLEGASALASIVKAILILEKGIIPGQPLLEKLNPDIDADMHHIMVPLEDTVWPSPGLRRISVNSFGFGGSNSHAILDDALHYMQERGLRGNHCTVSDPLVSNNTDVQARAVNGVNGEATRLPKLLVWSAADEGALNRMIQAYESYYEDRVAGDPSQLDRLAFTLAARRSRMLWRAFSIVNDGAETTSLTRPSKATRSSAEVGLAWVFTGQGAQYAHMGYDLCRYSVFRRTLEQVDGIYRGLGAEWSLFDELRSSENIDKPEYSQPLTTAVQVALVELLRSFGVSPKAVVGHSSGEVAAAYAIGALSLPSACKVAFFRGLLAGKLRAASACTPQAMISVNLSEAQVPDYLSKTELSTENALSSVCVACVNSPLNCTLSGPEAAIDAIKAQADRDGIFAQKLRTAVAYHSPSMLAIAGEYLTLMGHLEGAAASKVSGGITMMSSVTGKEVRPTELAKPQYWVSNMVSTVRFSDAVRALLDKFDSTITDLVEVGPHPALRRPARDTVGKEQQIRYAGVLDRSRPATETMLELVGQLFSLGHAVSIPSVNHEKAKPAPRPLVDCPAYPFDHSHRYWAESRLSRDFRLRGTVQGETLGMRASDWNPLAPRWRNFLSVESSPWLGHHKISDTVLYPAAGMLIMAIEAAQQQTAHGDRTVMGYQLEQANFLNPIIVPEAWEDRIETQVQLQPARKKENSFDVSIFSYSSRGGQWSECFHARITVEYQGEGAEGEHKRVADEAARTRQADAERRCRLPLDPEVFYRDASEHGLQYGDWFQLLREIRWDGRKTAVARVDLSRQRYRSESLVHPALLDTAFHVLRASAGQQPAANVPVRLEKAWFSATGWQHPGNGELRWLATSSRAIRDTDRPNRLGEDGTLQALAADGTVLCTIKTAVTAPVSKTAEGEKGNKEKKLLYSMEWKPQLSLLEPEQLARVCHVHFSARDETAIVSNHAKLCAALDLAAVRTLKHMDRSKIPKNHLLRHVDWMEHHVATLPAARRQEGETISDADLETRLREVEEVLPAWKLYTACARQLGSILAGEADPLQVVFESELANVFYANLFLNLCADGRLAAFLELASHENPAMRILEVGAGTGGMTGHVLNALQAREARTGAPSFAEYRYTDISPVFFERARNRWPDLHQQGRMTFQALDLDRPVDTQGLEAGSYDMIIAASVLHATPYLEATLRNVRTALKPGGRLVLVEVINPADVATNFMAGLVPGWWVAQEEWRPHSAAITEPMWDKLLRANGFSGNDMLLRDYESEECHIMSVIVSTAREPAKMQNAPSRRVVLVVDETPSDQQMQLAGLVGGLLGPGSGSGWQTPTVCPFARDELSRALTGLTEDDVVICLVEVDNRPLLANLSEQSYACLQQLVKGAPRLLWATAPSAADDPLAAHYGAVQGFLRSIRAEQSSSRLVSVAIEDCSDDATCADLIARAFRAAFEPSPPLGVASKEVEYVVRDGLLMTGRAVENVAGNEALRSLLQPHTQKVAWADAPALQLPMHTSGNDELLSFVQDITHDPEAEIGPDEVEMEAKAWSLSQDSLDNVVATRISDDDSLGTDERMPRSGTGCAGIITRVGRNVDKSLLRPGQRVCMLLPPGEGMRKYTRAHHTAVTKLPPAGNLSFEIGAASLVPAMTAYHALIDVARLRPGMTVLIHHAAGATAQMAVRMARAHGASRVLATASSPKEKQFVLDTLGLPAEDIFLARPAAAFASGVRAATQGAGVDVVFNNAFLGDDALLASCECLARGGCFVEAGRANLDSGTALPMSVFAKNISLSAAHLSDLSHDAVAGLAARVMELLDQGSVQPPQPLRVFDVSQANEAVKHVKTTEALGECVVIRPRDQDMVSYHEKEERNWMFDQRGSYLIAGGSGGLGRAIVRWMADRGAKHIIIASRSGATSEAARDLLADLGARGVNVVAMQCDVSSESSLAGMLEECTRRSMPPIRGCINAAMVLQDAIFQDSMTFAQWDLTMRSKVQSSYNLHRLLPQELDFFVLLSSLAGVVGQMGSANYAAGCAFQDALARHRLAHGQRGLSLDIGWMKNIGIIAETSAYQRQRQRLEDMQPIDAGELLAVLTLALDPALPLPMPLHAQPGQLLFGLRTPADLLAQGRAVPALLERPLFAAFSHHSTSVTAESSPSSVNASAPDDSVLFRQAAVGSRERSMIVRRALASKLARAMLIAPEDVEPTKPLSAYGVDSLMAVELRNWFGKEFGANVAVFDIMGGVPIAKIAETVAAKSTLK

SEQ ID NO: 4638 - DNA, 2739 bp, Myceliophthora thermophilia
atggagcaacccagccgcatcaccgcccctcgagagagagagaaatctgcagccagcgagcaccgccgtctccagagagagagcctttatggacctgagccatccttaaagaaagacttcaagaacccgagcctcgcctccaaagagagagacttcaaggactcgagcctctcctccacagagagagggagcttctattccgatgtaataaggatccgttctgagcgccggcgacgagacaccgatgagagttgcatctccaaccttgctctgcaacgaagcaataccggctggtcggctgcgggatcgacagccaccgacttgaccaactttgacagcacagacgccccttgtgctgacgactcggagggcgttgactccggggcagagacaagcgcaacaccaccaaggcgctcgagccttttccctcgttctctagcatccaggaggcgcctgacaataatacgggggccaccttccactctggacgaccgctctcccagttcattacccgatgagttagctcctgggcaccgtcgggtggaacaggtgggcttgcggaagtcaaacctcggtcggttcactgtgcctgacgcggagtatggaccgtcaccgtcttgtcgggaaccaagccctgcagcggttgccaagtcttgggacactgagtcgcgaggtcataagacagaccatgacagtgcagataccaggccttgcccgtcgcaaggcgacgggcatggccaggacggcaacgtctctgctctcagagcaggcgggatatccccgccttcgagtctgcagccagtcgaggacgcagctcagccgagcgtggtttcaggagacgaactggatgccgatgtggacaacgcaccgacttcccgggaagagggggctgaagcatcagggggcacaaacacccctcaagagcgacgggtctcctgttgcagcaccgggatgtcagactcgtgtgacgagggtttttggcggcgagcctccgggccggacgacagcatgatttaccaggtctgtgacctggtgctccagcaggcgtttgctattcccctgcacgagatggttcttgccggctcggcgccgatggtctacgagtcagtcggtcactgcctggatgagctctcccgcatcgtctttcagagcggccttggcgacacccacttgggagccagcagatcgacgttgggcacggcggactctggcggcgatcccgtctggccgggaagaggcgctgacgacggttttgatacaagcaatgggaatggtgactgccatgcgaacgggaatagtggccggaaacgttccaacggttatgagcatgatggtgacggcctcggcggcggttctggcggcggtagccctgatggaggtggaaaacgccaaaaggttttgccaacccaccaacggccggccaccgcggagttcagctgccccttccgtaagaggaacccagtgcgattcaatgtccgggactttcagagctgcgcagtaatgtcgtttccgaatatgtctcagctcaaacggcatgtgaagacctcacacaatcaaagagagctctggccattcacgtgccagcgctgcaggcgagctatgaaatcaaaaatggccttggaagaacatatatcggtctctagggaccagatctgcgacccccaagaggcgccgtccagagcggatccggaagatggcatcacatccggaatcgaagaggtcctcaatgaacgcaagacggacggcaaaatcgacgactggaagagcttgtggagactgttattccccggagacgccaagatacccgagccagactttgtgcctcccaccgaactggatgaggtgtacgcccagttttataccgacgactccacgagtctgctgtggcagcggatccaggaggtactaggacacactggcaacattcaacccatgttcgactccttcaagaactatatcgacacagtctttgaagcttgccgcctcaagacctgtggcatgtcgtacagccgcagacgagcacgcatccaggcggcgcggcaggtggcaagcgggcgatccccggtgcgacacgccccccgaccacatggatcagggcattcggaccacagcatcctagctcttgctgcctcctcggaccgcaccaacgtgccggaaagccttgggcagccctcaatgaccgagacgcaaccacacatattaggtaatgtgcctcccaacaacagttcccatgaccgtgggattgatggcgctggaaccacggtgccagaactgcggtttggcggcggcggtacagcggccgtccagggaagcgaacccgtgatggtcgcaactccggcgccgcggttgcacatccagctagagtctggttgccaaggtcagcgcatggcgggcacttcaagaggccacttggaccaaagcacccggctggcacaaaccaacctctgggctgatctcagtgccatcttcgcgggccggggagcaatagacgcttctgctgtcctacctctgggatcgcaaggtgcccactcacacccggaagcgtacggacagcaaatgggcgacgcttattggccagccatcacgctggacatcgcggcggacaaccatggggggcaggggcgcaggttctcgacgactgatgcgggcgcggtgtcggagggggatgatgctttccagggcatgtccgaggcgaacgatgatggatatgaagtagtccaccatacccgcggcgactga

SEQ ID NO: 4639 - protein, 912 aa, Myceliophthora thermophilia
MEQPSRITAPREREKSAASEHRRLQRESLYGPEPSLKKDFKNPSLASKERDFKDSSLSSTERGSFYSDVIRIRSERRRRDTDESCISNLALQRSNTGWSAAGSTATDLTNFDSTDAPCADDSEGVDSGAETSATPPRRSSLFPRSLASRRRLTIIRGPPSTLDDRSPSSLPDELAPGHRRVEQVGLRKSNLGRFTVPDAEYGPSPSCREPSPAAVAKSWDTESRGHKTDHDSADTRPCPSQGDGHGQDGNVSALRAGGISPPSSLQPVEDAAQPSVVSGDELDADVDNAPTSREEGAEASGGTNTPQERRVSCCSTGMSDSCDEGFWRRASGPDDSMIYQVCDLVLQQAFAIPLHEMVLAGSAPMVYESVGHCLDELSRIVFQSGLGDTHLGASRSTLGTADSGGDPVWPGRGADDGFDTSNGNGDCHANGNSGRKRSNGYEHDGDGLGGGSGGGSPDGGGKRQKVLPTHQRPATAEFSCPFRKRNPVRFNVRDFQSCAVMSFPNMSQLKRHVKTSHNQRELWPFTCQRCRRAMKSKMALEEHISVSRDQICDPQEAPSRADPEDGITSGIEEVLNERKTDGKIDDWKSLWRLLFPGDAKIPEPDFVPPTELDEVYAQFYTDDSTSLLWQRIQEVLGHTGNIQPMFDSFKNYIDTVFEACRLKTCGMSYSRRRARIQAARQVASGRSPVRHAPRPHGSGHSDHSILALAASSDRTNVPESLGQPSMTETQPHILGNVPPNNSSHDRGIDGAGTTVPELRFGGGGTAAVQGSEPVMVATPAPRLHIQLESGCQGQRMAGTSRGHLDQSTRLAQTNLWADLSAIFAGRGAIDASAVLPLGSQGAHSHPEAYGQQMGDAYWPAITLDIAADNHGGQGRRFSTTDAGAVSEGDDAFQGMSEANDDGYEVVHHTRGD

SEQ ID NO: 4640 - DNA, 1581 bp, Myceliophthora thermophilia
atggcgtcttcaatggcctcggcggctctcaagtcgcgcatcaagcgcccctcgatgctgaagaagctgtgccagcctcaagacctgctccaacacttccctaacggcgcctacatcggctggtccgggttcactggcgttggttatccaaagaaaatgcccaccttccttgcggaccatgtcgagaagaataacctccagggcaagctacgctacaccctgttcgtgggtgcctcatcgggcgcagagaccgagaaccgctgggcggctctcgacatgatcgagaggcgcagcccccatcaagttggcaagaacatcgccaagggcatcaacgaaggccgcatcaagttcttcgacaagcatctgagcatgtttcccgtcgacctcgtatatgggttttacaccaaggacaggatgagcaacaagatcgacgtggccgtggtggaggcgaccgagatcaaggaggatggcagcatcgttccaggcgcctctgtcggtgccacgcccgagcttctccagctcgccgaaaagatcattatcgaagtcaacacggctctgcccagcttcgacggcctacatgacattaccatgaccgacttgccgccacgccggaagccataccttattaccaacgtcgaggaccgcatcggctccaactcgatcccaatcgaccccgagaaggtcgtcggtatccttgagtcggattacaaggaccagaccctccccaattccccggcggacgaggtctcgcagaagattgccggccacctcatcgagttctttgagcacgaagtcaagcacggtcgcctgcctcccagcttgctaccgctgcagtctggcatcggaaacattgccaacgccgtcattggtggcctggataattccaacttccgcaatctcaaggtgtggaccgaggtcatccaggacaccttcctcgacctgttcgactcgggccgcctcgacttcgccacggccacttcggtgcgcttttccccgtccggcttcgagcgcttctacaagaactgggagtcctacgagaacaagctgctgctgcgttcgcagcaggtgtccaactcgcccgagatcatccgccgcctcggcgtcatcggcatgaacacgcccgtcgaggtcgacatctacgcccacgccaactcgacctgcgtcatgggcagccgcatgctcaacggcctgggcggctccgccgacttcctgcgcaacgccaagtacagcatcatgcacacgccctcgacccgcccctccaagacggacccgcacggcgtcagctgcatcgtgcccatgtgcacccacgtcgaccagaccgagcacgacctcgacatcatcgtcaccgagaacggcctggccgacgtccgtggcctcagcccccgcgagcgcgcccgcgtcatcattgacaagtgtgcccacgaggtctaccgccccatcctcaaggcctacttcgagaaggccgagagcgagtgcctgcgcaagggcatgggccacgagccccacctgctgtggaacgccttcgacatgcacaaggcgctgagcgaggagggcagcatgcagaaggtcaagctgtggtag

SEQ ID NO: 4641 - protein, 526 aa, Myceliophthora thermophilia
MASSMASAALKSRIKRPSMLKKLCQPQDLLQHFPNGAYIGWSGFTGVGYPKKMPTFLADHVEKNNLQGKLRYTLFVGASSGAETENRWAALDMIERRSPHQVGKNIAKGINEGRIKFFDKHLSMFPVDLVYGFYTKDRMSNKIDVAVVEATEIKEDGSIVPGASVGATPELLQLAEKIIIEVNTALPSFDGLHDITMTDLPPRRKPYLITNVEDRIGSNSIPIDPEKVVGILESDYKDQTLPNSPADEVSQKIAGHLIEFFEHEVKHGRLPPSLLPLQSGIGNIANAVIGGLDNSNFRNLKVWTEVIQDTFLDLFDSGRLDFATATSVRFSPSGFERFYKNWESYENKLLLRSQQVSNSPEIIRRLGVIGMNTPVEVDIYAHANSTCVMGSRMLNGLGGSADFLRNAKYSIMHTPSTRPSKTDPHGVSCIVPMCTHVDQTEHDLDIIVTENGLADVRGLSPRERARVIIDKCAHEVYRPILKAYFEKAESECLRKGMGHEPHLLWNAFDMHKALSEEGSMQKVKLW

SEQ ID NO: 4642 - DNA, 516 bp, Myceliophthora thermophilia
atggaagaggacaggactaaagaatgggagaatgctgaggccttcaacggcgagtgtgaccgacaccagtgtgccactcgagggaagtacgagggagtcgggcggcagcagcagatctccgatctactggagttgcaccttccaggcactgcactcttttgcggcgcgcggatcaacttgaactttgagatggccattcacagcccactagtggcgctctgtgtgcccccagttggcccgggatctgacgagatgggcgggttgattcagaattacccgataaataagtcggaagataatctccaattgcatgaccccttggctctttccctaaagaattggcttgaaccggactggcaaacagtgatacagaaggctagcgaactagtacatgtgctcgttggtctccgcgccaaggttggatcgtatgtcacagcgtgcgtcttcctgtgcgtccgcgacgagacggcgtcatcctcgggcaggtcgagattctgtatgttcactacgacttaa

SEQ ID NO: 4643 - protein, 171 aa, Myceliophthora thermophilia
MEEDRTKEWENAEAFNGECDRHQCATRGKYEGVGRQQQISDLLELHLPGTALFCGARINLNFEMAIHSPLVALCVPPVGPGSDEMGGLIQNYPINKSEDNLQLHDPLALSLKNWLEPDWQTVIQKASELVHVLVGLRAKVGSYVTACVFLCVRDETASSSGRSRFCMFTTT

SEQ ID NO: 4644 - DNA, 756 bp, Myceliophthora thermophilia
atggttcagaacggaggtgacctcgacctcgacatcgacatggctaccaacaaactggtcaacgaggcctacgccaaaatcgaagcgctcgagactgccaaagcaagccgcatcaagatcgaaccacctggcaaatacggaggaaccaaggaggatcttgcaggattcctgacaaacctccgatcctacttccggctcaataacgacaagtttccggacgacaaagccaaagttctctacgtagccacgagattagagggcaaggcgcttagatggttcgagcctacgtggaacgactatctcactgaggaagacgaagacgaccgagacgcgttcacgcaagcagtcttccgatcttacgaccgtttcgaagaagagctttggaaggtttttggcgacaaagacgagaagattcatgcgacgcaccccggagccatggatgtggacgtagcacagaagcaggataagaagaagacggccaaagacaagtctaacgttacctgctataactacggaaagaaagggcactacaagcgagagtaccggagcccgaagaaagaatggaaactaacccctgggaaggaaattgcggctatcgacgaaaccaccaaggacgtcatcgaagtagcggccacgagctacgaagataggggcagcgacacggatagtctcggacatgacgacaatagagaagacgaacaagcaccgtactccgaactggtcactatggacctagagacaggtctcgccgaatag

SEQ ID NO: 4645 - protein, 251 aa, Myceliophthora thermophilia
MVQNGGDLDLDIDMATNKLVNEAYAKIEALETAKASRIKIEPPGKYGGTKEDLAGFLTNLRSYFRLNNDKFPDDKAKVLYVATRLEGKALRWFEPTWNDYLTEEDEDDRDAFTQAVFRSYDRFEEELWKVFGDKDEKIHATHPGAMDVDVAQKQDKKKTAKDKSNVTCYNYGKKGHYKREYRSPKKEWKLTPGKEIAAIDETTKDVIEVAATSYEDRGSDTDSLGHDDNREDEQAPYSELVTMDLETGLAE

SEQ ID NO: 4646 - DNA, 498 bp, Myceliophthora thermophilia
atgcccaggctttacccaggcacagaacagacccaccctgccccacttacctacgccccacagaaggcaggccccctgaaggagctatcgagactgcttttaatgctcccggagctcctactgcgtttggcatatgagaagcatgatgatgaagaatgcgccgtctcgggacgtgatgagacgctggcgtcttgggtgttgactcaagccatcctgaagaactcggccccgcccgtagtacgactcggcgtggaggaccaagcccccgccaaccgcaccaggctcccagtagattccgagggcatgggttctccgagacaccacgccgaacccggcgctacccaaggaaccatagactgggggcctggcgatggcccccctcgtgacggaattgaaaacaacttgatttccacagcagctcgcgtgcccagagaggctgttcccggcattgctcaggcgtatgatcctgggccgtcctatgaaccagcaaccgaataa

SEQ ID NO: 4647 - protein, 165 aa, Myceliophthora thermophilia
MPRLYPGTEQTHPAPLTYAPQKAGPLKELSRLLLMLPELLLRLAYEKHDDEECAVSGRDETLASWVLTQAILKNSAPPVVRLGVEDQAPANRTRLPVDSEGMGSPRHHAEPGATQGTIDWGPGDGPPRDGIENNLISTAARVPREAVPGIAQAYDPGPSYEPATE

SEQ ID NO: 4648 - DNA, 240 bp, Myceliophthora thermophilia
atgcagcgaatacccctccaaaccggcacttgggattccgcagcctcagcgaagcattcggccccgcaggttgccctccggagctacaatgatccaatcaccaacaacaccacagttgcatcgtcggacccatgtgaggtcaagagaggatgggtgaattgtcaaaggtgccgtacactgctgcgtatggatgaggttgccgttgcccaaaagcggccgggaagtgggcgcgatgggtag

SEQ ID NO: 4649 - protein, 79 aa, Myceliophthora thermophilia
MQRIPLQTGTWDSAASAKHSAPQVALRSYNDPITNNTTVASSDPCEVKRGWVNCQRCRTLLRMDEVAVAQKRPGSGRDG

SEQ ID NO: 4650 - DNA, 603 bp, Myceliophthora thermophilia
atgtctgctagcattaccctcgccctcgccgctcggaagaatctgatcatcgacacgaatctcttcagcgatattgatgatgctggtgccctcctcatcgcggccacgtccccgggcgtcaacctgctcgccgtgaacatcaacagcccgtcctcgtactcggccctcgcggcccacgtcccgatcggcatcccgcgccccctgacggatgccacctttttcgacggctggtattttgcgctgaccgagtacgccagcaaggttctggccgaggcggacgacggcagtgtgaccatcgtgtcgatcggtttcctggacaacctctccgctctcctcaactcgtcagccgacgcccattccccgctccccggccgcgacctgctgacccgcaacctcgccgagctcgtcgtcatgggcggccgctacccttcctcctcctcctcttccgtcgccaacgatagtataggcaacggcggtggcagcagcggtggtggtgttggtagctggaactttgccggctcggacccggcgcgggccgcgcacgtggtcaacgacgacgacaacgacgacccctgttgccgctgccgccgccgctcctgctga

SEQ ID NO: 4651 - protein, 200 aa, Myceliophthora thermophilia
MSASITLALAARKNLIIDTNLFSDIDDAGALLIAATSPGVNLLAVNINSPSSYSALAAHVPIGIPRPLTDATFFDGWYFALTEYASKVLAEADDGSVTIVSIGFLDNLSALLNSSADAHSPLPGRDLLTRNLAELVVMGGRYPSSSSSSVANDSIGNGGGSSGGGVGSWNFAGSDPARAAHVVNDDDNDDPCCRCRRRSC

SEQ ID NO: 4652 - DNA, 1287 bp, Myceliophthora thermophilia
atgtcgacgtttggcgaatatttccgagtcaccacctatggcgagtcgcactgccgctcagtcggctgcatcgtcgacggatgcccgcctggcatggagctcaccgaggacgatatccagccccagatgacacgccgtcggccgggacagagcgccatcacgaccccgcgcaacgagaaggacagggtgttgatccagagcggaaccgagtttggtgtcacccttgggacgccaatcggtatgatggtgctgaacgaggaccaacggcctaaggactacggcaaccaaaccatggatatctacccgcgacctagccatgccgactggacctacctcgagaagtatggtgtcaaggcgagcagcggcggtggcaggagcagcgcgcgcgagaccattggccgtgttgcggccggcgccatcgccgagaagtatctgaggttggcctacggcgtcgagatcgtggcctttaccagctccgtcggcaacgtccacctgttccccccaactgctgaacatcccagcccgagcacgaatccgaactttctcgcgctcctgcagacggtcgatcgcaagacggtcgacagcttcctcccagttcgctgccccgacgaggccgtctcccgcaagatggaggagaccatcgccgaattcaagaagcgcgaagacagcatcggcgggacgatcacctgcgtcatccgcaacgcaccaagcgggctgggcgagccctgcttcgacaagctcgaagcgaaactggcacacgccatgctcagcatcccggccaccaagggcttcgagatcgggtcgggattcggtggttgcgaaattcccggctcgacgcacaacgatcctttcatcccggcgaccaatgtggagctcccgtccagcgtggccgagagcggcgccgccaagtcgggcttcgcgcggcccaagttgacgaccaagaccaactactcgggcggcatccagggaggtatctccaacggcgcgcccatttacttccgggtcgccttcaagccgcctgccaccatcggtcaggcccagacgaccgcgacgtacgacggcttatctgagggtgttctggcggccaagggacggcacgatccttgcgtcgtgccgagggcggtccccatcgtcgaggccatggcggccctggtgctgatggacgcggtgctagcccagcaggcccggcatactggcaagagcttgctgccaccgttgaagcagacgatcaattctggaaagccggctggaaacggcgtgacggagaccgaggagaaaagtccatag

SEQ ID NO: 4653 - protein, 428 aa, Myceliophthora thermophilia
MSTFGEYFRVTTYGESHCRSVGCIVDGCPPGMELTEDDIQPQMTRRRPGQSAITTPRNEKDRVLIQSGTEFGVTLGTPIGMMVLNEDQRPKDYGNQTMDIYPRPSHADWTYLEKYGVKASSGGGRSSARETIGRVAAGAIAEKYLRLAYGVEIVAFTSSVGNVHLFPPTAEHPSPSTNPNFLALLQTVDRKTVDSFLPVRCPDEAVSRKMEETIAEFKKREDSIGGTITCVIRNAPSGLGEPCFDKLEAKLAHAMLSIPATKGFEIGSGFGGCEIPGSTHNDPFIPATNVELPSSVAESGAAKSGFARPKLTTKTNYSGGIQGGISNGAPIYFRVAFKPPATIGQAQTTATYDGLSEGVLAAKGRHDPCVVPRAVPIVEAMAALVLMDAVLAQQARHTGKSLLPPLKQTINSGKPAGNGVTETEEKSP

SEQ ID NO: 4654 - DNA, 1545 bp, Myceliophthora thermophilia
atgggaccgagaaccatccgactaggcacggcgtcgcccgcaactcaggccaccacagcccagatgctggttcagctcgagcgcatcgcgcggcgggctgcgtccaagagcatcgacatccttctgctgccggaagcctacattgggggctaccctcgcggtagttcttttggctgtgtcattggctcccgctcgcaggaaggccgagacgaatatctgcgctacttccagagtgctgttgacctcggggatacagtcggtgacggagccggtgccgggcaggcctgggtgaacagagagttgccgggtgatgcggtgcccgggtctcggcctgacggcgatctccccaacaagcggggcgacggaactcgtgaggagttggagcgtatcgctcgcgaaacccagatcttcctcgtaaccggcctgatcgagaaggccggggggagcatatactgctccgttgtctacgtatgcccgaaattgggcatcatcgggaagcggaggaaggtcatgcctactggtaccgagaggctggtctgggcccagggttcgcccgccacgctccgcgccgtcagcacgaccatccgtgggatacgcgtgaacctcgcggccgccatctgctgggagaactacatgcccctggtgcgccaagccctctacgcgcagaatgtcaacctctacctggccccgaccgccgacggccgcgatgcctggctctccttgctccgcaccacagccatcgaaggccgctgcttcgtcgtcagctccaacatgtgcgtgagagacagcgcttcgacaaatggggacaccaccgccgcctccgtccaccgtgcagacgaaatcaacggcacagctcgagacctatcccctctcactcggccgaacacgcatccccaccacctatcaagcgcgatagaagaagaagacaacgagatcgccttccccggcccaacagcaacctcgccctcgaccttcggcccgtctcacgacgcccactctcgggagagcgacccgccccgccggcgacggtccgtcttcgacgaagacggcaacgagatcgtcctggcgtgcaaacccccagtatctccactcgcccacaccgccgccgcacccccaaagccgcgcggcagacgccggtccgtcttcgacgaggacggcaatgagatcgtcctctgcgcgggggatagcagccctggcgacaaggagcgggggaggaggacggggcgggcggaattgcctcccatcgcgaccgcgaccactaccaccaccgccacagttcccaagcccacgaccgcggcagcaacgcaacaggcgccgaaaaccgggttcatctcccgcggcgggtctgccatcgtctcgccctttggggacgtcctggccggcccgcagtgggaggacgacgagggcatcatctacgccgacgtggactttgacgactgcatccggggccggctggatctggacacggcggggagctattcgcggaacgactcgttcaggatggaggtgcgggggctggatctgaccgcccttccttatcattaa

SEQ ID NO: 4655 - protein, 514 aa, Myceliophthora thermophilia
MGPRTIRLGTASPATQATTAQMLVQLERIARRAASKSIDILLLPEAYIGGYPRGSSFGCVIGSRSQEGRDEYLRYFQSAVDLGDTVGDGAGAGQAWVNRELPGDAVPGSRPDGDLPNKRGDGTREELERIARETQIFLVTGLIEKAGGSIYCSVVYVCPKLGIIGKRRKVMPTGTERLVWAQGSPATLRAVSTTIRGIRVNLAAAICWENYMPLVRQALYAQNVNLYLAPTADGRDAWLSLLRTTAIEGRCFVVSSNMCVRDSASTNGDTTAASVHRADEINGTARDLSPLTRPNTHPHHLSSAIEEEDNEIAFPGPTATSPSTFGPSHDAHSRESDPPRRRRSVFDEDGNEIVLACKPPVSPLAHTAAAPPKPRGRRRSVFDEDGNEIVLCAGDSSPGDKERGRRTGRAELPPIATATTTTTATVPKPTTAAATQQAPKTGFISRGGSAIVSPFGDVLAGPQWEDDEGIIYADVDFDDCIRGRLDLDTAGSYSRNDSFRMEVRGLDLTALPYH

SEQ ID NO: 4656 - DNA, 1419 bp, Myceliophthora thermophilia
atggctggatcccaacaatcgggcggcgggtttgaccccctcgagttcatggacttctcacaatacgacagcaacaacaataacaacaacaacaacgacaacaacaacgccaacaccaataacaacaacaacaacacaaacaccaacaacctcgggtaccagccatcatcgctgtcgccctcatcctcgatcactctcaagtcagagacttcggatgcaccgtcgctgtttccctccaaccagggcttctcggcgcccagccatcagtacgacctctacaagcagcagacaggccttgtccctggtgcattgaccaccaccctgtccatgaatgagccccacggttactttcaggagtttctcgatcttcaacagaacgacatgctcagtggcttggggggagcggacgatgtgttcgacttcaacgcgcctttgacgggcggccttgatgcttcggggttggatctggatatgggcttccagacacaggcgtcggataccgggatctacctgaactcgaccatcaaccccagcgccattggtgggcaggagcctgatgctctgacctcgcccctgccctccacacccgcactgtcgacgcccccaggccgcgtgtggccaggtattcaccaacagcaggcagccttgagggcacaacagaggcgacaacagcagcagcagcagcaacaacaacaacaacagcagcagcagcagcagcagcaacagcaacaacagttgcagaggcaaagagctcaacaacaggttaagcaggcgccaaagcccaggtcgccgcagaccagcagctctattgctgagcaaaacgttcaacaaatactcaactcgatgcgttccgagcccgtgcaatacacgcccatcaagactctaccgcatatgaactttaccaggcggccaaagacagaggcggagatggacgaggatgagaagttcctggccagcgaggagggcaagaagctcagcagccaagagcgtcgccagctccgaaacaaggtctccgcccgcgccttccgcggcaggaggaaggagtacatcagctggttggagacccagctgacggacaaggtcaacgaggccggcctcctccgggcgcagaaccaagcactgatcgaggaaaacgcgcggctgacggggctgaccaagatgctcctgtcgtcggagcacttccgggacatgctggccgacctcagctcaaacccccagaagctggccgacctgcgctccgccaacgagcctcaagcccagcagcaggcgcgccagcaggccgagcgcgaggcccagatgcaggcccgcctgcaagccaacaaggacgccaacccccatctcgccgagcagcaacacctccagtaccaggagcactttcgcctacacatgatggccaaccgtcatacgagcgtcgcttga

SEQ ID NO: 4657 - protein, 472 aa, Myceliophthora thermophilia
MAGSQQSGGGFDPLEFMDFSQYDSNNNNNNNNDNNNANTNNNNNNTNTNNLGYQPSSLSPSSSITLKSETSDAPSLFPSNQGFSAPSHQYDLYKQQTGLVPGALTTTLSMNEPHGYFQEFLDLQQNDMLSGLGGADDVFDFNAPLTGGLDASGLDLDMGFQTQASDTGIYLNSTINPSAIGGQEPDALTSPLPSTPALSTPPGRVWPGIHQQQAALRAQQRRQQQQQQQQQQQQQQQQQQQQQQQLQRQRAQQQVKQAPKPRSPQTSSSIAEQNVQQILNSMRSEPVQYTPIKTLPHMNFTRRPKTEAEMDEDEKFLASEEGKKLSSQERRQLRNKVSARAFRGRRKEYISWLETQLTDKVNEAGLLRAQNQALIEENARLTGLTKMLLSSEHFRDMLADLSSNPQKLADLRSANEPQAQQQARQQAEREAQMQARLQANKDANPHLAEQQHLQYQEHFRLHMMANRHTSVA

SEQ ID NO: 4658 - DNA, 285 bp, Myceliophthora thermophilia
atgtttcacgagtacagtacatatgcaccacaacggcgctattccagtttgagcacatctgatgtttcgcgtgtcctgtgcttcaggagaggctcctcgttcacccatggtgggccaacatatgggaagttctggaacaactcgcgcatcgtgtttgcggtcaacggtccacaggtcccttgctcgaaagccggatggggccacgttgatccaccgcagacccccggagtcatggcctgggaaggacggattactccgtacactacggagtactatgtagtttaa

SEQ ID NO: 4659 - protein, 94 aa, Myceliophthora thermophilia
MFHEYSTYAPQRRYSSLSTSDVSRVLCFRRGSSFTHGGPTYGKFWNNSRIVFAVNGPQVPCSKAGWGHVDPPQTPGVMAWEGRITPYTTEYYVV

SEQ ID NO: 4660 - DNA, 4305 bp, Myceliophthora thermophilia
atggcaacgctctgggtcgaaggcattcgtcaaggagctaatcccccgctctggaacgctccagggcttccaacctccacgggcccgaccagcaccatgattgttgagaaagagtcggccgtcatggggcttcctggcgaacacacccagtatctgcaggccaaccaccgacgcctggtcaaatttgattcggtggacgatccgaactacaacatcctgctccgctgcttcaacacgacgatcgaggaaattgagaagagctttgccgcggataagttcgagaaccaccgctcccagatgaagcagatcgcccaggcctttgatgtggccgagcgcccagacggcgacttcattcgaatgctcgacaaactccacacgggctcttgcgagtggctgacctcccacgaagccttccacgactggctagagtgtgaccccggtgaccctgacgccaccgtcaaggccatcacttccggcccattcaagccaacgcctcggtttttgtggctcaacggtcctccgggatccggcaaatccgttgcctcggggcatgtcatcaagtaccttcagtcctacaacctcgactgcgcctacttcttcttcaaaagcaatgaaaagccgactctcacgcagtttctcctgtccatagcactacaaatggccgagtccaacttccagattcgccacaccttcctggccatgatggaagagggcgaaaccatcgacagtcatagcgaccatgtcatggtatggaacaacatttttctaggacgcatcttcaagatggccctctcacagccccagtactgggtcattgacgccctggacgagtgccagccacggctcctgggcacgctgatgtccatgttctcaagaatcgagccgacagttccgctcagaattttcatcaccagccgtcccagcggtcatgttgagaggctgctgaaccaggagaagattatgagagtggaactgcacactggtcaggcagagtcgctcagagacatcgatgcctttgtcaggtccaggctgtcacccagcatcatcgaggagttcaacgaagatgacggcgatctggtggccgagattatcgagaaatcaaacggaatcttcctctgggcatccctcatcatgacgaggctcgacgaggcccacagcattgaggccatgcgcaagaccctcgaccaggtaccctccgagatgagtggcatgtacaacgggatcctcgagagcatcatcgagtccccaaacgcagacctcgcccactgtattctcaagtgggtcgtctgcgcccggaaacctctgacgaccgaagagctgcgagaggtggttcgcctagacatcaaccagaccctgcgcacctcggacaggttctcgcaaatctgtggcaacctcatcacggttgacaacaatctcgttcaggtcatgcaccaaaccgtcaaggagttcctcaccggcgagcaatccgattattacatcccgcggtcgtggtctcacgcgcgcattgccgaactctgccttcagcaccttaacggccgcaacttcagcccccctcgcacgcgccgtgctccggctgtttcctccaaagccgaccccagcagcaacagctccgccgccttcgacgactacgcggccaccaacttctcctatcacctcgcgcactgctccccatccgaatccaccctcgacctcctcccgctcctcggcacctttgtctcttccaacgtgctgacctggatcgagcgcgtcgccaagaccggccgcctctccctcatcacccgcactatccagaacctcaaaacgtatctctcccgccaggtcgccacatcctccccgctcaacgccgactaccagctcaccgtccgcttcgtcgacgacctcatgcgcctctcggccatctacggccccaacctcgtcaagatgccgtccagcatctactcgctaatcccgctgctctgccccaggtcaagccttatccactggaagtttgcgcgccagcagttccccaggcagaaggtcctctgcacgttcaacaacgactgggacgagcgcctgagctccttcgccttctcgtcacgcgtcatgtctatcgcctgtgccgaccagttcttcgcggtcggcctgggcgacggcgccatcaaggtctaccggcagagtacgtttgagctgctgaacacggtacaccacggcgagcccgtgcggaggctggccaacggaaacctcacgggaatattgatttcgggcgggctgaagacgctcaagatctggggtccgaagcaggtgctgctgtgggccgcggcggtgccggagcagccgctctcgttccggttcagtcccgacgactccaaggtgtacgtgccgctacggaacggtgaggtgcacgtgtaccgggcaagggacggggcgaggttagatgcgctggagatcctaggggaggacagctcgtcttcgtcgtcgtcgtcgtcgtcggactcggattcggaccacggcggcggcgtggagcgcaagaaccagcagaagcggacgatgccgacgctgatccggatcagcccgatgctgggaatcgcggccatcgcgtaccggagctcgcacctgcagctatcgtactacgagagcggcgagaaggtcgaggcattcgagaaggagggctacgaggacggggggctgccgccgcaggtgctggatgtcgcgttcaacgagaaccccgagcagaacctgatggcggtggcgtaccaggacggggacctcgtgacgctcgacccgtggacgctgcagcagaagcacgcgtaccatctgaacgcgcacatgctcgcggcgtcgcccgacgggcacacgctggccgcgggcgacagcgagtgcgtcatctcgctctttgcctttgacggcctgcggctgctgtgccggatccattctctcgaggagcgcatcatgggcatcgtgttcgcctccaacagcctgcggctctttgatctcaggggcaacaactgcaacgtctgggagccggcggtgctcatcaagaaaaaccttgccgacgacagctcgagcgaggaggcggacgactacctgatgcccgcgtccaacctgatctgcacgcggacgttcgagggcagcaaggccatcaccgtcatgacgcaggcgggagactccaactttgtcttttgcggacgcgaggaaggttccatcactgtacacgatgtcagctccggcaaggtgtgtgccgagtttcaattccacgcccgcatggttgacgtccgccacctcgagtggaacgcgcagaagcaggtcctcttcagcgtcgacgcctcgcgacggtgcgtcgtcacgagggtgagcctgccgacgtcggcgacggcgaccacggcggtgcagaagcagcagcagcaagcccagctgcggagtgtcgagcacatcctcgacttccgggcgtcagatacggtcgtccaggctctcatcagccccgacgcatccgcgttcctcgtcgtgacggcatccggagaggaactgcatctcccgggcgaggcaagctgcaccatccagtcggcaaactcctcgaacaaagcgcgctggctgcggcaccccacggaccccgagcgcctcctgctcttccaaaacgatagcgcagtcctccacatcttccgctggaaggacctcacccgcgagacacccgagcagggtatctctgtcgtcctcccgccggaactcgcctcggccccctcagccctgacaaatgactggcacttccgacccgggtcatccatactcgcgcaagccgtcccgctcccgcgcctttcctcctcctcctcctcctcctcaaacacaggcttcctcacgctagacctctcccagctcagcgacccagccgagacgacgagtatcgcggcgcagtgcgtgacccggcggctggcgtcgcaggtcaagtcggtcctgggggtgcaccggtcgagcctgtatttcctgagcgggcgcgggtgggtgtgctcgatcgggctcaagaacctggcggcgagcaagtcgtacgtgcggcacttcttcatcccgtcggtttggcagacgggcggggcggagccgatggcgcgggtggtgtccaagacgacggtggcgatggcgtaccgggacgagctggtggtgctgcaggggttcttggagtttgagcacaagactccgtttggagaggagaacgggcaggacgatgaggaggaaaaggaagagaagaaagaggaaggggggctagaagatggagaaggtagtaaggagggcgaaggaatgaaaaagacggcggcgcctgttattatcagaacttcatga

SEQ ID NO: 4661 - protein, 1434 aa, Myceliophthora thermophilia
MATLWVEGIRQGANPPLWNAPGLPTSTGPTSTMIVEKESAVMGLPGEHTQYLQANHRRLVKFDSVDDPNYNILLRCFNTTIEEIEKSFAADKFENHRSQMKQIAQAFDVAERPDGDFIRMLDKLHTGSCEWLTSHEAFHDWLECDPGDPDATVKAITSGPFKPTPRFLWLNGPPGSGKSVASGHVIKYLQSYNLDCAYFFFKSNEKPTLTQFLLSIALQMAESNFQIRHTFLAMMEEGETIDSHSDHVMVWNNIFLGRIFKMALSQPQYWVIDALDECQPRLLGTLMSMFSRIEPTVPLRIFITSRPSGHVERLLNQEKIMRVELHTGQAESLRDIDAFVRSRLSPSIIEEFNEDDGDLVAEIIEKSNGIFLWASLIMTRLDEAHSIEAMRKTLDQVPSEMSGMYNGILESIIESPNADLAHCILKWVVCARKPLTTEELREVVRLDINQTLRTSDRFSQICGNLITVDNNLVQVMHQTVKEFLTGEQSDYYIPRSWSHARIAELCLQHLNGRNFSPPRTRRAPAVSSKADPSSNSSAAFDDYAATNFSYHLAHCSPSESTLDLLPLLGTFVSSNVLTWIERVAKTGRLSLITRTIQNLKTYLSRQVATSSPLNADYQLTVRFVDDLMRLSAIYGPNLVKMPSSIYSLIPLLCPRSSLIHWKFARQQFPRQKVLCTFNNDWDERLSSFAFSSRVMSIACADQFFAVGLGDGAIKVYRQSTFELLNTVHHGEPVRRLANGNLTGILISGGLKTLKIWGPKQVLLWAAAVPEQPLSFRFSPDDSKVYVPLRNGEVHVYRARDGARLDALEILGEDSSSSSSSSSSDSDSDHGGGVERKNQQKRTMPTLIRISPMLGIAAIAYRSSHLQLSYYESGEKVEAFEKEGYEDGGLPPQVLDVAFNENPEQNLMAVAYQDGDLVTLDPWTLQQKHAYHLNAHMLAASPDGHTLAAGDSECVISLFAFDGLRLLCRIHSLEERIMGIVFASNSLRLFDLRGNNCNVWEPAVLIKKNLADDSSSEEADDYLMPASNLICTRTFEGSKAITVMTQAGDSNFVFCGREEGSITVHDVSSGKVCAEFQFHARMVDVRHLEWNAQKQVLFSVDASRRCVVTRVSLPTSATATTAVQKQQQQAQLRSVEHILDFRASDTVVQALISPDASAFLVVTASGEELHLPGEASCTIQSANSSNKARWLRHPTDPERLLLFQNDSAVLHIFRWKDLTRETPEQGISVVLPPELASAPSALTNDWHFRPGSSILAQAVPLPRLSSSSSSSSNTGFLTLDLSQLSDPAETTSIAAQCVTRRLASQVKSVLGVHRSSLYFLSGRGWVCSIGLKNLAASKSYVRHFFIPSVWQTGGAEPMARVVSKTTVAMAYRDELVVLQGFLEFEHKTPFGEENGQDDEEEKEEKKEEGGLEDGEGSKEGEGMKKTAAPVIIRTS

SEQ ID NO: 4662 - DNA, 675 bp, Myceliophthora thermophilia
atgagtgttacgatctggagaagctcccgcgagctgcaaccgaagctgaaagcacaagtcatcgcatggacgtccacgagaatccggtggcgttcctctgccaacgctctcgggtcatctcctcgtccgaataccctaaaacagccggtctggctgtttcccgtggtcatcagcggccgtaagattgcccgatacacggagtacgcagtatgcctggcgcccccattgaacacggcgcaaacagggacggcggatccgtttcgccacgtcttaagagcgaggcgccgggcatccacaacagtgcacaagtcagtcgaaacccacgcgggaacgacacgcgtgttccgccggcttctaccgctggcgatcagatacctgagatttctgggaaacagtccatttccacgattccgtactggctgtcgggttcgcatcaagttcgcggatgttgcgagcgaatgtcattctgcaacggctggtccttcaacggatggcagtttcctggcttttgaacattgccagactccgcggaacttcttgcagtcggcaatcacatggcaaaagggcaaatgcgacgtgattctaacactgactgatttcacgggcgcggtcatcgatggcaaagaattgctccgtactccctgcgtagtgtgggttctacatgtccatccctag

SEQ ID NO: 4663 - protein, 224 aa, Myceliophthora thermophilia
MSVTIWRSSRELQPKLKAQVIAWTSTRIRWRSSANALGSSPRPNTLKQPVWLFPVVISGRKIARYTEYAVCLAPPLNTAQTGTADPFRHVLRARRRASTTVHKSVETHAGTTRVFRRLLPLAIRYLRFLGNSPFPRFRTGCRVRIKFADVASECHSATAGPSTDGSFLAFEHCQTPRNFLQSAITWQKGKCDVILTLTDFTGAVIDGKELLRTPCVVWVLHVHP

SEQ ID NO: 4664 - DNA, 1704 bp, Myceliophthora thermophilia
atggccgacacctgcgccgggaacggcgctgccacttgctcgaaccagcagagcctccctatcctaaacagccgatttctctcgcacaccgcccttccggtcctgtgtttcacaccaatagccgcccttatccttttccccctgttctggcgggccctaggctccttgctcggctggtacctacgcaagaagacggacgggcgccgatgtcatattctagagctcgtggaggccgacgagaaaaagtacaatgagagcaggcgcaccagcaccagcagcagcaccagcggcggagagagtgccgaggatggcggctgggagaaagtggatgcttacacgacgggagcggcgaggaacggcgacgtgtccgacgacaactgggatggcattgtgggattctttcacccattctgcaatgccggtggaggcggagagagagtcctctgggccgcagtccgcgcgacacagcagcgctggcccaaggccaagtgcgtcatctacacgggcgaccatggcaaccgcttcaacatccacctgcatcccccaaccatcaacttcctatacctctccacccgccactgggtcctagcatccacctggccgcgcttcaccctcgccggccaatccctcggctcgctcatactcgcctgggacgccttctcgctcctcgtccccgacatattcatcgacacgatgggctacgccttcgccctcggcctgtccaagttcttgttcggcgccagcgtgcccacgggtgcgtacgtgcactatccgaccatctcgaccgacatgctcgactcgctcgaaccgggcgctcccgaggcgccggcacgcggggtcaacgccggccagggcgccggcgtccgtggcaaggtgaagaaggcctactggcgcctctttgcggccgcgtactcgcgcgtcggtgcgtccgcggacgtggtcatgaccaactcgacctggacccagggtcacatccggcggctgtggggcccgctgaggaacgcgaagaagccggccgcccaccccatcgccgtcgtgtacccgcccgtcgcggtgcgcgagctggagcacgaggtcgaggtcaccccggcgagcgaggcgaggagggagaaggtgctgctgtacattgcgcagttccggcccgagaaggatcacgagctgatcctgcaagcctttgccgagttcctcaagtccggggccgacgcggcgaaagacgccagactggtgctggtgggcagcgtgcgagacgatcaagactccaagcgggtgtatcagctccgcttgctggtcaacgagctgcagatcagggacaaggtcgagttccacctggacgcctcgtggcctgagatccttgattggctgcgccgggcgtcggtcggggtcaatggcatgtggaacgagcactttgggatcggcgtggttgagtaccaggccgccggcctggtggccgtggtgcatgatagtggcgggccgaagatggacatcgtggttgatattgacggggagccgactggattccacgcgagcactgcgagtgagtttgcggaaggcttcgggaaggctttgagcttgcccgatccgtacgccgttcgccaacgggcaagacagtcggccaagaggttcaccgaggaggagtttgcgaggaggtggacggagcagatggagaagctggtggctgcgaagaggggaactacaaaggcatga

SEQ ID NO: 4665 - protein, 567 aa, Myceliophthora thermophilia
MADTCAGNGAATCSNQQSLPILNSRFLSHTALPVLCFTPIAALILFPLFWRALGSLLGWYLRKKTDGRRCHILELVEADEKKYNESRRTSTSSSTSGGESAEDGGWEKVDAYTTGAARNGDVSDDNWDGIVGFFHPFCNAGGGGERVLWAAVRATQQRWPKAKCVIYTGDHGNRFNIHLHPPTINFLYLSTRHWVLASTWPRFTLAGQSLGSLILAWDAFSLLVPDIFIDTMGYAFALGLSKFLFGASVPTGAYVHYPTISTDMLDSLEPGAPEAPARGVNAGQGAGVRGKVKKAYWRLFAAAYSRVGASADVVMTNSTWTQGHIRRLWGPLRNAKKPAAHPIAVVYPPVAVRELEHEVEVTPASEARREKVLLYIAQFRPEKDHELILQAFAEFLKSGADAAKDARLVLVGSVRDDQDSKRVYQLRLLVNELQIRDKVEFHLDASWPEILDWLRRASVGVNGMWNEHFGIGVVEYQAAGLVAVVHDSGGPKMDIVVDIDGEPTGFHASTASEFAEGFGKALSLPDPYAVRQRARQSAKRFTEEEFARRWTEQMEKLVAAKRGTTKA

SEQ ID NO: 4666 - DNA, 1818 bp, Myceliophthora thermophilia
atggctaccggccaaacaacaatagatgtcggcgccacgcccatggcccctcaggccagtggccaaaagcaacatggcaaacggccgttccaaggaccccagcgcaagggggcaaagcacaggaggaagcagaagacggttcaggaggggtcgcacgaggaggtgctgctggccgacgtgcaggcactgttggcctcgcagaagcttgcgggcgacttcgagggcgatgctgccgaaggggcatcggcaccgctgccggagccgggcagcgagatcgaggttgaggtggtcgagctgtcatccacgggcgacgggctggcgaagcagaaggggtccgaccacatatacgtcgtccccttcgccgtccccggagacacggtcaaggtcaaggtgtaccgccacaaccgtgacgaggggtacaccgccgccgacttcgtctcggtcgtcaagccctcccctctgcgcgacgacagccggatccggtgcccgtactttgcaaagtgctccgggtgccagtttcagatgctcgactacgacgagcagctcaagatcaagaagaacatcgtcgtcaaggcgtaccgcaacttctcacagctgccgcccgagctggtgcccgaggtcctcgacaccatcggcagcccgctgcagtacgggtaccgcaccaagctcacgcctcactttgacgggccccccggcaactcccgaagggggcccaagaaggcccatcagtcgatgccgccgttcggcttcacgcccaagaacacgcggaaggtcctagacgtcgaggactgcccgatcgccaccgaggcggtgcgcaagggcctggtcgaggagcgcgcccgcctggcaaaggagtacggcaactacaccaagggcgcgaccgtcctccttcgcgagaacaccaagcgcgttcccaaggccagcccctccgacaccccggcggtgccggaaggcatcccccccaccgcggtccgcgtcgagacggacgcgcacgtcgacttcaagacgtgcatcaccgaccagaacgccacctcgaccgagtacatcgactcgttcgtcttcaccaacccagccggcgccttcttccagaacaacaactccatcctgccccccttcacctcctacatccgcgagcacatcctccctcctcctcctcctcctcctcccgccgccaccaccacgaccaccaccaccaccacaacaacatcctcctctaccaccacgacgagcaagaaaaaaccgatccgctacctgatcgacgcctactcgggctcgggcctcttcaccatcacgcagtcggccctcttcccgggcgggagcgtggggatcgacatcgcggacaagtcgatcgcgtacgcgcggcgcaacgcggcgctcaacggcctgcgcgaggaccagtgccgcttcatcgccgccgacgcgcccgagctcttcaagagcgtcggcgcctacgacccggacgagaccgtcgtcgtgctcgacccgccccgcaagggctgcgacgccggcttcctccgccagctgctccgcttcgcgccccggcgcgtcgtctacgtcagctgcaacgtgcacacccaggccagggacgtcggcatgctcgtcaggggggcggtcgacgaggccggcggcaatgtgcccggaggaggtggtcgtgatgctgctgctgctgctgctgctgccgccgagggaggcggccaggaaaagaaggcgggagcgaggtatgagattgagagcatcaggggtttcgatttcttcccgcagacgggacacgtcgaaagcgtggctatactgaatcgggttgatgctgtagacagctag

SEQ ID NO: 4667 - protein, 605 aa, Myceliophthora thermophilia
MATGQTTIDVGATPMAPQASGQKQHGKRPFQGPQRKGAKHRRKQKTVQEGSHEEVLLADVQALLASQKLAGDFEGDAAEGASAPLPEPGSEIEVEVVELSSTGDGLAKQKGSDHIYVVPFAVPGDTVKVKVYRHNRDEGYTAADFVSVVKPSPLRDDSRIRCPYFAKCSGCQFQMLDYDEQLKIKKNIVVKAYRNFSQLPPELVPEVLDTIGSPLQYGYRTKLTPHFDGPPGNSRRGPKKAHQSMPPFGFTPKNTRKVLDVEDCPIATEAVRKGLVEERARLAKEYGNYTKGATVLLRENTKRVPKASPSDTPAVPEGIPPTAVRVETDAHVDFKTCITDQNATSTEYIDSFVFTNPAGAFFQNNNSILPPFTSYIREHILPPPPPPPPAATTTTTTTTTTTSSSTTTTSKKKPIRYLIDAYSGSGLFTITQSALFPGGSVGIDIADKSIAYARRNAALNGLREDQCRFIAADAPELFKSVGAYDPDETVVVLDPPRKGCDAGFLRQLLRFAPRRVVYVSCNVHTQARDVGMLVRGAVDEAGGNVPGGGGRDAAAAAAAAAEGGGQEKKAGARYEIESIRGFDFFPQTGHVESVAILNRVDAVDS

SEQ ID NO: 4668 - DNA, 1869 bp, Myceliophthora thermophilia
atggcgccaggcgaaccgaaccaggaacggaaacgcggccggcctcccggatcctccgccgcgtcgaggcatgggcccaagtatgtccattcacagaatcaaatgagtcctgacgctgtcgcggaggcggaaaccccccccaagaaacgaggacgtccgcacaaaaggatcgatccaggggctcgagatgaagctcaacccgcaaccgaacaagtcgaccagacggcgctgtcggccatggccccaaaaaggagggggcgtccgccaaagactcgtggccctgaaccggcggaggaagtttctcccgaggagcggccacgcaagcgaaggagggaggtagaggaagaggaggaagaaggagaacaaagggacggcgggagaggcaagtcccgtaggtcggacaaggtatcgaacaatgcaccacgggaacatcccgacgatcaaggaacagaggaagcgacacgacggaaaggaagaggtcgccgggctgacgggagccctgtacgaccaccccagcgagcatctcaggccgagagcggacaggcagagagagcgaaaggcagatcggggcggaagccggcaaatcgtgaagaccggggcgaagaccgggaaacggacgagacctctcagcgcagaagtcgaaggaagcgcctgtctgtcgaagataagcaagaggggcctggcaaagagccatccctaggagcttcaggttcaggcccaagcacacaaacacaggccccagcaaaacgaaggcgcggccgcccctcgctagcagaagtgtccgtctcgagggttcaaaaccaggctttttctcctcaaccggagaagatgcaagcaaagaagagggggcgggagcgccctcctcgggcttccaatcccgacgcggccgagtcgtcgcgccaggtcgcggaaccatcgtcctcggacaggccagcgagaccggcggcaaccaacaagctccccaaccggcgcacctccgccgaagccaccgggccggccggcgagccatcacgacaacaacaagaagatcccctcgacatgctcgccaaacaccgccgcctgacggccctcacccgacacatcccgcgcgcgaccatcgcgtccaagtggacgtccctctcggccccgtccatcgcggccgtctcctccctcctggccgacagcgcccgccccgtgctccaccgcctccgcgaccgcgaccagcgccacgcgcaggccgccctcatctgcgcacgttcgccgcccgctgcactccaagctggtcaagggcatgcccttcccgcccccgaccgtccccgcgccgagggggaggaggccgacgaagggggtggcggcggcgggggaggacacgaggtcgagctggactttgagaagacggtcgacgccatcgcgggcctggagcgcgcgctggatccgctgctgcacagcttggtcctcctgaggcgggagaaggagcgggaggagagggcgctcgagagggactacgcggccctgcggcggctggaggcgaacgcgagggcgcaggccaggggctggaaggagggccgcgggaggggcagggagcacgtcctggtcggggggctcgtcggggcggagggggataggaatggggaaagcggttcgttggagcttgttccgccttcggccaagcacggagcgggtggtgccggtggggttttcaaggatctgcaggaggaagaactgctcgccctgtcgcagcagattgggagccacatggagagcatgaagaacaacttgagtcagatcgagggggtgctgcctgctattgcgagaagcagagctgcgctacagggagtgctgtgtgagcatctggatccggaacagtatgaacaggtgctgcttgggtaa

SEQ ID NO: 4669 - protein, 622 aa, Myceliophthora thermophilia
MAPGEPNQERKRGRPPGSSAASRHGPKYVHSQNQMSPDAVAEAETPPKKRGRPHKRIDPGARDEAQPATEQVDQTALSAMAPKRRGRPPKTRGPEPAEEVSPEERPRKRRREVEEEEEEGEQRDGGRGKSRRSDKVSNNAPREHPDDQGTEEATRRKGRGRRADGSPVRPPQRASQAESGQAERAKGRSGRKPANREDRGEDRETDETSQRRSRRKRLSVEDKQEGPGKEPSLGASGSGPSTQTQAPAKRRRGRPSLAEVSVSRVQNQAFSPQPEKMQAKKRGRERPPRASNPDAAESSRQVAEPSSSDRPARPAATNKLPNRRTSAEATGPAGEPSRQQQEDPLDMLAKHRRLTALTRHIPRATIASKWTSLSAPSIAAVSSLLADSARPVLHRLRDRDQRHAQAALICARSPPAALQAGQGHALPAPDRPRAEGEEADEGGGGGGGGHEVELDFEKTVDAIAGLERALDPLLHSLVLLRREKEREERALERDYAALRRLEANARAQARGWKEGRGRGREHVLVGGLVGAEGDRNGESGSLELVPPSAKHGAGGAGGVFKDLQEEELLALSQQIGSHMESMKNNLSQIEGVLPAIARSRAALQGVLCEHLDPEQYEQVLLG

SEQ ID NO: 4670 - DNA, 555 bp, Myceliophthora thermophilia
atggcgccgacagagcaaactatcctcagcaattacctgctcgccccagcgcagctgcctgccatcatctcgctgcaggaattcactgctctatttcctcggaaactgcagtcgtctcccaggatccgcagtctctaccgcgacttgcagagccagagaaatgctgtcgtggaccatgtggccgcccagattgagcaggaggcaaagcatggaaaggcaatgcggcgtgccgtgatcaggtcaaagcgggaggcagaggcccaagagcaggacgatgaaatcgagattgagaggatgctgggaaactggtcagagccgcagaacgcaaagcacagtctggcctccatcctccccgacatggagggcgccatcggcgcgctagaagctgagctccaactcctggaggaagaggaagcatccctgctcgcctctgtgcggcagaccgtcggcgcgatgagcgacctgcgctacggccgcctggctaatagccagctcccggaacaggtactagacggcctgggcaatctagaagagatttgcaggtcaaagaattga

SEQ ID NO: 4671 - protein, 184 aa, Myceliophthora thermophilia
MAPTEQTILSNYLLAPAQLPAIISLQEFTALFPRKLQSSPRIRSLYRDLQSQRNAVVDHVAAQIEQEAKHGKAMRRAVIRSKREAEAQEQDDEIEIERMLGNWSEPQNAKHSLASILPDMEGAIGALEAELQLLEEEEASLLASVRQTVGAMSDLRYGRLANSQLPEQVLDGLGNLEEICRSKN

SEQ ID NO: 4672 - DNA, 453 bp, Myceliophthora thermophilia
atggctggtattttttatatagtaagaaattatatagtatccgatattttattaaatatagcatcatcattaggtaatattcaaattattttacctaaagacttattggcagggttcacagctacaatttttaaattacctctacaaggggttatagaggatattgtagatacattaaaagctcctagcgctaatttagttttattaaaaggttctgatggagcttctggttcagttgaagttccaggtttaactggagcttcaacttcagctgaaggtcaagcttcgggttcagaagctgagccttctgagtcaggtgaatattctgatgcagaatctaatgttactcctaatgtatatcctagtgaaactcaagaacttatatacagtcctaacgaaaaattaaaaggtctacctaaaaaggtaatgcgcctgcacgagatgcacaactaa

SEQ ID NO: 4673 - protein, 150 aa, Myceliophthora thermophilia
MAGIFYIVRNYIVSDILLNIASSLGNIQIILPKDLLAGFTATIFKLPLQGVIEDIVDTLKAPSANLVLLKGSDGASGSVEVPGLTGASTSAEGQASGSEAEPSESGEYSDAESNVTPNVYPSETQELIYSPNEKLKGLPKKVMRLHEMHN

SEQ ID NO: 4674 - DNA, 1197 bp, Myceliophthora thermophilia
atcaaagaaggcgacgagtggaaaacggcttttaggacaccctatggctactacgagtacctcgtcatgctattcggacttacgaacgcgccggcaacgttccaagccctaattgatcaagctatccgaccctttctcgacaaatttgcgacgatagacgaacaccggaagcacgtgagagtagtgctggacgtgctatatgcgtataagctatcagtcaacaaggaaaagagcgaattccacgttaggaaaacggtgtttttgggatacaaaatatccccaggacaaatcaggatagaaccttcaaaagtcgaagccatcaagaattggccacaaccgacgtcagtcacggaagtacgaagtttcatcggatttgcgaacttctaccagatgttcatcaggaacttcggagcgatcgcacgacctttgcacgaacttactaggaagggcgctgagttccaatgggaagagcgacatgagcaagcattcgcgcagattcgcgacgccattaccgaggatccagtactggtattaccagaccccaagaagccatttaaggtggaaacggacgcttcagactacgctatcggaggacaattgggacaacgagacgaacaagggaagctatatcctgtagccttcttttcaaagaagctcgatggaccacgtctcaattatccgatccacgacaaggaactacttgcgattgtcgaagctttcaaggaatggcgactataccttagcggcacgattgaaccagtacaagtgtatacagatcacaagaatctgcggtacttcatgacaacgaaggagcttaacggacgacaaatacgatgggcagaattccttgcggaatttaattttgagatccgctacaagaagggcaaagagaacgtacgagcggatatcttaagccgacgaacggatcacacggaaggacgaacggaaataacaccaccgttgttcaaggaacgaacagacggaacgctgcatcacgaaacgcagacacccgtagaagatgatccactcgactcgttcctagaatgttacgtaatctttcgagaagaaaggatcaacgaggcacagtatcaagcaacacctagaccagcggtacctgacgaagtgaaagaaaaagatgggaaactctggtaccgagggcaagcgtacatctacgacaaagatcacagctacgaatga

SEQ ID NO: 4675 - protein, 398 aa, Myceliophthora thermophilia
IKEGDEWKTAFRTPYGYYEYLVMLFGLTNAPATFQALIDQAIRPFLDKFATIDEHRKHVRVVLDVLYAYKLSVNKEKSEFHVRKTVFLGYKISPGQIRIEPSKVEAIKNWPQPTSVTEVRSFIGFANFYQMFIRNFGAIARPLHELTRKGAEFQWEERHEQAFAQIRDAITEDPVLVLPDPKKPFKVETDASDYAIGGQLGQRDEQGKLYPVAFFSKKLDGPRLNYPIHDKELLAIVEAFKEWRLYLSGTIEPVQVYTDHKNLRYFMTTKELNGRQIRWAEFLAEFNFEIRYKKGKENVRADILSRRTDHTEGRTEITPPLFKERTDGTLHHETQTPVEDDPLDSFLECYVIFREERINEAQYQATPRPAVPDEVKEKDGKLWYRGQAYIYDKDHSYE

SEQ ID NO: 4676 - DNA, 366 bp, Myceliophthora thermophilia
atgatcgcgcgcacaaagcgttacgaggcctattggatcgcattcttcaggagcagcgtcgtatcaaagatgctgaacgtcgtgccgaacttgagctggataaatcccaacgccgtctggaagaggcccagccgtcttcgtcagcagaaggagtttttggtagagaaaggtgccgatatggtggcgcgtggtctgtcgaccttagacgagttagaggaggttgagcggcaagagacgcctgctatgccctcgtcacagattaatgatgccgtcgatgctgtcgactggggcgccgtctttggttctgtcctaggtttttctttggtcgatccgggttctaccggtggaactgttccaatttcttag

SEQ ID NO: 4677 - protein, 121 aa, Myceliophthora thermophilia
MIARTKRYEAYWIAFFRSSVVSKMLNVVPNLSWINPNAVWKRPSRLRQQKEFLVEKGADMVARGLSTLDELEEVERQETPAMPSSQINDAVDAVDWGAVFGSVLGFSLVDPGSTGGTVPIS

SEQ ID NO: 4678 - DNA, 1352 bp, Myceliophthora thermophilia
atggcccggaaggggatcctgtcgccggcgtcaaataatcaagcaaatctacccaaggggatccggccgcgcaaaggcaatcgcctgcatccaactacacctagcgagacaccatatctacaagatccacaggattcgccggcaccaggtcgcaagcgcaagcaatcaatcgaacacgcgctcgaagataacccagaaccagacccagacccaaagcgacaacggacatctccacgccccaccaaagacgcctttggcgagccagcgattggcagcggcgcatacaaacatactgacctagttgctttctgggtgaaggaagggcgctggccagagaagcaggactggccggaagagacctcagagacggattttaccatggatcgtctacttgcgcggaagaaatcctcgtccaatctacggaagcggtcgatctctgccacatccacgacgcctagcgaccagaagctgagggaggagaagagtgcaccataccgaaacccacgctacaagatgctgcttgagaccaaaggcagctttatggacgagtctgaactagggatcatcgacgagagcaagactttatgtcagacattgctcgagacagcacaggcagagcctcaggataccttgtttcgttccgatattttcaaattaacctgccagaaggtagaagataggaacgagacaagagttatccgggatattacaccattaattgttccgccagcagaaatcctatatatatatggtgccagccaccttaaacatctcatcgagagcgtcaacgaagggtggaacaactcgatccctctcactagtacccgtccacagcctgactactccgttgggtttaaacgagacgcattcagtgaggaccaactcgccaagctatcgccatttattggcgacttcatcgccggggaccagtccttctttatggccacatactatatgtacttcccgttcctgacttgcgaggtgaaatgtggcaccgcagcactcgatatcgcggaccggcagaacgcccatagtatgacccttgcggtacggggcatcgtcgagctcttccgtattgttaatcgcgagaatgagatcaaccggaagatcctcgcattctccgtctcgcatgaccaccggtcggtacggatctacggccactacccggtgataaacgggaaagatactaagtactaccggcacccgatccatgaattttctttcattgcgctagacgggaaggacaaatggacggcatatcgatttacgaaaaacgtctacgatatgtggatgcccgagcatttcaagaatatctgctctgccatcgatcagttgccctcggatttggactt

SEQ ID NO: 4679 - protein, 450 aa, Myceliophthora thermophilia
MARKGILSPASNNQANLPKGIRPRKGNRLHPTTPSETPYLQDPQDSPAPGRKRKQSIEHALEDNPEPDPDPKRQRTSPRPTKDAFGEPAIGSGAYKHTDLVAFWVKEGRWPEKQDWPEETSETDFTMDRLLARKKSSSNLRKRSISATSTTPSDQKLREEKSAPYRNPRYKMLLETKGSFMDESELGIIDESKTLCQTLLETAQAEPQDTLFRSDIFKLTCQKVEDRNETRVIRDITPLIVPPAEILYIYGASHLKHLIESVNEGWNNSIPLTSTRPQPDYSVGFKRDAFSEDQLAKLSPFIGDFIAGDQSFFMATYYMYFPFLTCEVKCGTAALDIADRQNAHSMTLAVRGIVELFRIVNRENEINRKILAFSVSHDHRSVRIYGHYPVINGKDTKYYRHPIHEFSFIALDGKDKWTAYRFTKNVYDMWMPEHFKNICSAIDQLPSDLD

SEQ ID NO: 4680 - DNA, 315 bp, Myceliophthora thermophilia
atgcgactacggacggatgtttttcatatttcacttctcgaaccagcaccaaagagcgccaaggttgccacgcacatcgaagcagaggacaaggaagaagaatgggacgtcgaagaaattctggattcacgcatcatcaacggagaactgcagtacctggtcaaatggcttgattttggaccagaagacaactcatgggaaccaaaccggctccaaagcccattccccgacagaaaaaagaggggaacccgccagataggaccgggatccaacccgatcgactccatcagccgtcaaagtaccacgctgagctga

SEQ ID NO: 4681 - protein, 104 aa, Myceliophthora thermophilia
MRLRTDVFHISLLEPAPKSAKVATHIEAEDKEEEWDVEEILDSRIINGELQYLVKWLDFGPEDNSWEPNRLQSPFPDRKKRGTRQIGPGSNPIDSISRQSTTLS

SEQ ID NO: 4682 - DNA, 507 bp, Myceliophthora thermophilia
atgaccgactacgagatggagcgggtcaaggcgttggggtgtggcgtcgcgcactgccccatatcgaacatgaccgtcggcggcggcttcatggccgcccccgtccgggagttcctgcggcgggggatcaaggtcgggctgggcaccgacagcggcggcgggttctcgagcagcatcctagacgcgatgcgccaggccatgatcgccagctacgcgcgcgaggtcatgtccaagggacaagacaagggcttgtccgtggatgaggtgttctacctggctactctgggcggtgcccaggtctgcggcttgggtgacaggattggaaatttcgaggtgggcaaggactttgacgccatcgtcgtcgggactcaggggagcgaacagggaatcatgaccgtggtggaggaaaatgatagcctcagaaccgtgtttgaaaagttcatcatgacgggggatgacagaaatctcatcaaggtttatgtccagggacggccggtaaagggttaa

SEQ ID NO: 4683 - protein, 168 aa, Myceliophthora thermophilia
MTDYEMERVKALGCGVAHCPISNMTVGGGFMAAPVREFLRRGIKVGLGTDSGGGFSSSILDAMRQAMIASYAREVMSKGQDKGLSVDEVFYLATLGGAQVCGLGDRIGNFEVGKDFDAIVVGTQGSEQGIMTVVEENDSLRTVFEKFIMTGDDRNLIKVYVQGRPVKG

SEQ ID NO: 4684 - DNA, 549 bp, Myceliophthora thermophilia
atgccccagattggtcatgttgggtgtgcgagccaagtaggcgccccaggcgagcagacccagcaacatttgccattcttgccctgttgtgagatcgcttgcggagcgatgtgggctgtcgtccacgtcacaaacccggttggcggtgacggtgacggtccgtactccatgctgcttgctgtctgtggtctcttccaaatcgacaggattgccgcccgcctcgacgtggttcatttcgcgaacgggtcaagaccaacgacagagcggaaacagggcggcttgggcaaccaggtgatcacccgagctggccagcgcttcgctttcgtggggtcgatcttgtggatctcgtacatctcatcttgggtgtcgtatcagctgtcttcgtcccagacattgaaactcaacctgatttttggagtgcccatttttagtgcaccggcctgtggttattggccaggcctcaatctgtgcgccgccgccgagactgtgctgaagcacaaaaaaatgcgcgacgcgccccaggccaatgcctccccgctgctcgcctga

SEQ ID NO: 4685 - protein, 182 aa, Myceliophthora thermophilia
MPQIGHVGCASQVGAPGEQTQQHLPFLPCCEIACGAMWAVVHVTNPVGGDGDGPYSMLLAVCGLFQIDRIAARLDVVHFANGSRPTTERKQGGLGNQVITRAGQRFAFVGSILWISYISSWVSYQLSSSQTLKLNLIFGVPIFSAPACGYWPGLNLCAAAETVLKHKKMRDAPQANASPLLA

SEQ ID NO: 4686 - DNA, 303 bp, Myceliophthora thermophilia
atggcatgggatcgtggcatcctcaaccgagcacgagagcaacagtatctcggccggggaatatcatacgacagggatgccgcgagcctcaaggtgccagggcggtgggatccattggccaggccggctgcccgcaggggagggaggaaagccaccggcagcaatccgccggccgcctccggggtgtggggggctgccgagccccgggttatccgagagaccagagcggaagaggcaagggaggtgacgctttcccccgtcaaaatgtttgctgcccatgtccgggctgcggacgatacgtaa

SEQ ID NO: 4687 - protein, 100 aa, Myceliophthora thermophilia
MAWDRGILNRAREQQYLGRGISYDRDAASLKVPGRWDPLARPAARRGGRKATGSNPPAASGVWGAAEPRVIRETRAEEAREVTLSPVKMFAAHVRAADDT

SEQ ID NO: 4688 - DNA, 333 bp, Myceliophthora thermophilia
atggtctctcggcgtctcagcatcgacactaccgctacaggttgtattccacgcgaacatctcgacagcggagagggcgtgacggacctgccgagctcggtctcctgcgcgaccgcctccacctcggcgaccggctccgccgccagcgccccgaccaccggctcggcctcgaccacggcctcgggctccggcacgaccttcggtcctaccaacaccgccaccgccgccgccaccgagacttcgacccagtccagcaacctcggcccccgcccgactgctgccgccggcctcggcgccatcggcggcatcattgctgccgtcgcccttctctaa

SEQ ID NO: 4689 - protein, 110 aa, Myceliophthora thermophilia
MVSRRLSIDTTATGCIPREHLDSGEGVTDLPSSVSCATASTSATGSAASAPTTGSASTTASGSGTTFGPTNTATAAATETSTQSSNLGPRPTAAAGLGAIGGIIAAVALL

SEQ ID NO: 4690 - DNA, 2526 bp, Myceliophthora thermophilia
atggttccgaaaaccatggtttccaacgaggtctaccttctgccgctcaacgacgatggctcaccccaggtcgccggcgagtatatctacctagcgcccaagaacggcatggatggctacgacgagactcacgttcatcacgaagacgaatacatcacggtacaccgagttcaacccgactcgcggaagggatacttcctcattgcgcacaccgcgttccccggatatggcaatggaaacggcgctctgaatccggtccgcctgacaggcacaagggcgaagcaccttggcagctggatgctcgaggttgactcaagcaaggaggccgtcgaggaggtgttgagcgacaggaagtatctgcgcggccttcccagccgcctcgtcgcagtccccggtatccgcatggaggtcaagggggatgacaccatcataaccgtgcgcgaccggttcccgcccggcagcatcgcattgttcgagacctggatccctgctgccgagcactccagcggcctggatacctttgtcacatcaggcgccaaagcagcgatggaggagcttgacctggtggacctgaactttttgttgtacaggtgcgagccggaggagcgcgacggcagcgaagggcaagatggtgtctacgatatcccgggccatggcaagcttgtctacgcgggcttgcaggggtggtggagcatcctcaaagacatcatcagggacaacaaccttgcgcaccccctgtgccagaaccttcgtgatggacagtgggcgctcgactacatcgtgagcagattggagcgtgcatcccagcagcaaccagcctacagtcgtctggaaaagcctgcagcgtggttaagagagaggttcgacgcgatccgtaacatccccagcttcctccttccgcgatactttggcttggtcctccgcacggcctacatggcagcatttgagaggggcatctctctcatgagcagcaacatccgaggcgcgcagtggtttgtgcagagcctggccatggtcagtgtgcagcagacgagcatagtcaggtccgcctccctctatccggaccgccttgtcccgtcgctcgctgccggccttccgcacttcgcagtcgagtgggcgcgctgctggggccgggacgtcttcatctctctgcggggcttgtaccttggcaccggacgtttcgaggaagcaaaggaacatatccgtgcctttgccagcgtgctcaagcacggcatgatccccaacttgctcggcagtggcaacaacccgcgctacaactcgcgcgactcggtttggttctttctgcagtgcatccaggattacacccgccttgcccccgatggcttgtcgctgcttgatgagaaggttaagagacggttcctgccgtatgacgacacgtggttctcggtcgacgatccccgggcgtacagcaaggagagtacaatccgcgagatcattcaggagatcttccagcgccacgccgaggggatgagattccgcgaagcaaacgccggccccggcctcgacatgcagatgaaggacgaagggttcaaccaggagatcaaggtagactggagcaacggcttcgtctttggcggcaaccagcacaattgcggcacctggatggacaagatgggcgagagcgagcgcgcgggctccaagggcgtacccgggaccccgcgtgacggtgccgctgtcgagatcatcggtcttctgtacagcgctctcaactgggtcgcaaccttgaacgagcagggcaagtacgagcagtcctccgtccgcagggccgacggctccgagatctccttccgctcctgggccgaccttatcaaggccaactttgagcgctgcttcttcgtccccgtctccccctcgtccgaccccgactacgacgtcaatccttccatcgtccaccgccgcggcatctacaaggacctctaccgctcgggcagggaatacgaggactaccagctgcgctgcaacttccccatcgccatgacggtcgccccggagctcttcgacccgtcgcacgcgatgcacgccctctgcatcgcagacaaggtcctgcgcggccccatcggcatggccacgctggacccgagcgacctcaactaccggccgtactaccacaacagcgaggacagcgacgacttcgccaccagcaagggccgcaactaccaccagggccccgagtggctgtggccgaccggctttttcctgcgcgccctgctcaagttcgacctgatgcggcgccccaaggacgacgccgagggccggaccgaggcgttccagcaggtcacccggcgactcaaggagtgcaaggacatggtcaggcgcagcccctgggccggcttgaccgagctgacgcagaagggcggcgaggagtgtcctgattcgtgccctacccaggcttggtctgcgggctgtctgattgatctgtacatggatgctgccgaggagcaggcgaaagtagagggcaaggcgctgcctcctgaggtgagacgggaatttggatatgagaattag

SEQ ID NO: 4691 - protein, 841 aa, Myceliophthora thermophilia
MVPKTMVSNEVYLLPLNDDGSPQVAGEYIYLAPKNGMDGYDETHVHHEDEYITVHRVQPDSRKGYFLIAHTAFPGYGNGNGALNPVRLTGTRAKHLGSWMLEVDSSKEAVEEVLSDRKYLRGLPSRLVAVPGIRMEVKGDDTIITVRDRFPPGSIALFETWIPAAEHSSGLDTFVTSGAKAAMEELDLVDLNFLLYRCEPEERDGSEGQDGVYDIPGHGKLVYAGLQGWWSILKDIIRDNNLAHPLCQNLRDGQWALDYIVSRLERASQQQPAYSRLEKPAAWLRERFDAIRNIPSFLLPRYFGLVLRTAYMAAFERGISLMSSNIRGAQWFVQSLAMVSVQQTSIVRSASLYPDRLVPSLAAGLPHFAVEWARCWGRDVFISLRGLYLGTGRFEEAKEHIRAFASVLKHGMIPNLLGSGNNPRYNSRDSVWFFLQCIQDYTRLAPDGLSLLDEKVKRRFLPYDDTWFSVDDPRAYSKESTIREIIQEIFQRHAEGMRFREANAGPGLDMQMKDEGFNQEIKVDWSNGFVFGGNQHNCGTWMDKMGESERAGSKGVPGTPRDGAAVEIIGLLYSALNWVATLNEQGKYEQSSVRRADGSEISFRSWADLIKANFERCFFVPVSPSSDPDYDVNPSIVHRRGIYKDLYRSGREYEDYQLRCNFPIAMTVAPELFDPSHAMHALCIADKVLRGPIGMATLDPSDLNYRPYYHNSEDSDDFATSKGRNYHQGPEWLWPTGFFLRALLKFDLMRRPKDDAEGRTEAFQQVTRRLKECKDMVRRSPWAGLTELTQKGGEECPDSCPTQAWSAGCLIDLYMDAAEEQAKVEGKALPPEVRREFGYEN

SEQ ID NO: 4692 - DNA, 126 bp, Myceliophthora thermophilia
atgcggtattcgcagcctgacccggacggcggttttgacatcccagagcccaaggccaacccagcggcttacggcacattggatgatgatgacacaaatagaaacctgagctggctccaactttga

SEQ ID NO: 4693 - protein, 41 aa, Myceliophthora thermophilia
MRYSQPDPDGGFDIPEPKANPAAYGTLDDDDTNRNLSWLQL

SEQ ID NO: 4694 - DNA, 519 bp, Myceliophthora thermophilia
atgaagagcggctgggacctccaccttcacctgctgcatgagcgggaaggggccgcctggtgctggattgacagctgcaaaagcaagcagtctggagaggggaggaggaagaaggaggggagcgccgggggagagggggggggggaatgggtgcagcttcggcggccatgcacaatcgaggcgcgtgtgtatttactttcgtgcagcaactgcaggccgaccaaccaaccgttgcacaccctcgcttacaccctggtccggtctggtcttgcgccccacctgtcaccctccccacctcatggctgcacttgggagggctacccgccccctcctgcatggtccttacgcacaccatctctctacggattacactacgcagtactcgcattcctagctctccccggattctccgacagaggttgcggcacgagaggcgtgttgcccttcgcgtcacatggcgcgacgttgcatttgattgaactctgtcgccccagttccctgaccttagaacacaaatga

SEQ ID NO: 4695 - protein, 172 aa, Myceliophthora thermophilia
MKSGWDLHLHLLHEREGAAWCWIDSCKSKQSGEGRRKKEGSAGGEGGGEWVQLRRPCTIEARVYLLSCSNCRPTNQPLHTLAYTLVRSGLAPHLSPSPPHGCTWEGYPPPPAWSLRTPSLYGLHYAVLAFLALPGFSDRGCGTRGVLPFASHGATLHLIELCRPSSLTLEHK

SEQ ID NO: 4696 - DNA, 288 bp, Myceliophthora thermophilia
atgcagaccaccggcttccagtccatccgggcgcgcctcttgccgcggagcctccgtggctcgcttcggcggtccatgtcgtcgtcgacgacgtcctcgcgggccagcagcactgacgtggcgtcgttcacctcgctggccagctcgccggtcagcgtcatcaacagcatcgtgttccgccagaagtcggttctcgaatcgtatgacgaggcggagcgtcccccgcacattctcgaaccgaggcccattgccccctttggcagtgtagagcagcgcttgtttatgtga

SEQ ID NO: 4697 - protein, 95 aa, Myceliophthora thermophilia
MQTTGFQSIRARLLPRSLRGSLRRSMSSSTTSSRASSTDVASFTSLASSPVSVINSIVFRQKSVLESYDEAERPPHILEPRPIAPFGSVEQRLFM

SEQ ID NO: 4698 - DNA, 276 bp, Myceliophthora thermophilia
atgtcgggcgacgacgctgagggcccgcttcaagatgccgtagccttttatccacgttcgatttgtccacgagaacgcgaaacgcagggcggcccagctaatgtagcttgggcatggccgacacctgattccggaaaggaggcgcccgtgacgggtgacctgggaagacagggagtgagaagcggcacacaaaagaaccgacgcgacgatcgagtggttcaaggttacaccacctggcaatacggtaattacacgttctccactcgacccgcctga

SEQ ID NO: 4699 - protein, 91 aa, Myceliophthora thermophilia
MSGDDAEGPLQDAVAFYPRSICPRERETQGGPANVAWAWPTPDSGKEAPVTGDLGRQGVRSGTQKNRRDDRVVQGYTTWQYGNYTFSTRPA

SEQ ID NO: 4700 - DNA, 1089 bp, Myceliophthora thermophilia
atgaccatgaccatggccgatgaccacagccggcgccgcttcggtcccttgagcttccaccacatgccatcatactcgagtcaacctcacttctcagacccctgggcctcctcgtcaccgacgggaccgaacccccaaggcgggagccaactctaccccggaaatcaggacagcgcgggcctgcctcacttgaacctcggcacccttcccaggcaaccaccgacgccgcaacatcctcagcacccgcagcatccgcagcatccgcagcacgggcagcactcggtcacgacggggaacagcacatcgatggcgccctacgcatccctcccggtcacggccgcctcggccaacgccaccctctcgggcgtctacagacagcatgacatgatgccgatgccgtcggatcccttcagcatgaatcggctacaacagccggcgacatcggcagcgtacgatggttcggcgtacaccagcgccgcctctcccgtaagcgcgtcctacgcaccgacgtcggcgtcgccttacgatcagctcggctacgcccccgcgcagatgaggggcacgtttgccctcgggcacgaagacagctcgaggaggtactcgcaacaaggcttgcagccagatgaccggaggagcttccaggacgcgctggaggcgagccacgggatgctctcgatgagccaggagacccctcgcaacatctacgacgtgcgcaaccgggggcggggttcggacgactcgtatggtttcccttcgacacactcgtcaacttccagcatgtcatcggccgggttcagcgggtactacggaggctccgttgacggatcggtcagcgactattccgcggcgggttccgacatcgagtccttgtccgggcgaacgcttcccaggccgcagggcctcatgtcgagccagccgccagcacctcaatctatgatggggtccttcagctccagggtgtcttcgagcgcgcagaagaagcacaagtgcaaggtctgtgacaagcgtttcacgaggcccagctcgttgcagacgcacatgtacagccacacgggcgagaagcgtaagcgagaaccctatttgctttaa

SEQ ID NO: 4701 - protein, 362 aa, Myceliophthora thermophilia
MTMTMADDHSRRRFGPLSFHHMPSYSSQPHFSDPWASSSPTGPNPQGGSQLYPGNQDSAGLPHLNLGTLPRQPPTPQHPQHPQHPQHPQHGQHSVTTGNSTSMAPYASLPVTAASANATLSGVYRQHDMMPMPSDPFSMNRLQQPATSAAYDGSAYTSAASPVSASYAPTSASPYDQLGYAPAQMRGTFALGHEDSSRRYSQQGLQPDDRRSFQDALEASHGMLSMSQETPRNIYDVRNRGRGSDDSYGFPSTHSSTSSMSSAGFSGYYGGSVDGSVSDYSAAGSDIESLSGRTLPRPQGLMSSQPPAPQSMMGSFSSRVSSSAQKKHKCKVCDKRFTRPSSLQTHMYSHTGEKRKREPYLL

SEQ ID NO: 4702 - DNA, 306 bp, Myceliophthora thermophilia
atgactcttaccatcaaatcctcctccctcatcaagcatatcactcgtgatggtcggacaatcgctctcaagtacgcaacgcagaccgacgcgtggaaccgttcttacctctcctcggacgttgcggagaagttcgtcaaagccgtggagaacaaggcctatattccccccgacgtcacggagatcatcatggcggaaaccgaccacaagagcccagcagacgagcgtactcacttcaccgctcaggccaatgacgacaagggcgagcgcgtcgaggtcatgcacatccttcctgcctccgagtga

SEQ ID NO: 4703 - protein, 101 aa, Myceliophthora thermophilia
MTLTIKSSSLIKHITRDGRTIALKYATQTDAWNRSYLSSDVAEKFVKAVENKAYIPPDVTEIIMAETDHKSPADERTHFTAQANDDKGERVEVMHILPASE

SEQ ID NO: 4704 - DNA, 795 bp, Myceliophthora thermophilia
atgcaagccgagccgctaacatattctggctcggaagttgcatcaccaacgtgctcgcatgcctctctgctggtttctcttccgctgatctgcactttgaactccatacacgatgcccagcaaagcatcgcatctccttccacttccgccggcggcatgccatcgggacgtcgggggaccgaggcgtcatcggcccagttctgcggccaacttctccaccccgtcccttcgtctttggcccatcgacaactcttgacggctgcagctcaacatcttggatggtccatcaatctccttggacaggcggtatgcatgagcgcctaccgccccgccgtccaatcagcacgctacggtgcggttttggctcatccgtcggccgtggtcgcgctcacggcggcctgccctccaacaccggcaaccagaggcgttgaggcgaaaccggtccggccggacaagaagcccgggtccaggcacgttttgattccgcgagtcccgacactgaccggcccagcattgattgggtttccggtgttctcctcgccctggctctcctggtctcaccaccggaaagcggagacccgtcagatggaagaggggacttcttctgggccgtccaatgtggccgcatcgaggccgagccctgagctggcccacggaggaaggaacaataaccaaggcagcaccgaagtcacttgcctatcctgtaaggcacccgaccgcaaactgcgagggtggtacactcaacaccagccactgggagccaatcctgccgtgatttcgctttgtgaggagtaa

SEQ ID NO: 4705 - protein, 264 aa, Myceliophthora thermophilia
MQAEPLTYSGSEVASPTCSHASLLVSLPLICTLNSIHDAQQSIASPSTSAGGMPSGRRGTEASSAQFCGQLLHPVPSSLAHRQLLTAAAQHLGWSINLLGQAVCMSAYRPAVQSARYGAVLAHPSAVVALTAACPPTPATRGVEAKPVRPDKKPGSRHVLIPRVPTLTGPALIGFPVFSSPWLSWSHHRKAETRQMEEGTSSGPSNVAASRPSPELAHGGRNNNQGSTEVTCLSCKAPDRKLRGWYTQHQPLGANPAVISLCEE

SEQ ID NO: 4706 - DNA, 243 bp, Myceliophthora thermophilia
atgtggcaagacagcacagctccaagcgccgagtcgcgactgggcggtaaagcctctcgtcgcatctttgaaacccgccgctgcgacagtcctttctgggccccgaaaaggggggggagaggggggggcaatgcgggcggggggctgcaacttgcgaccgcttcggcccaggtcgagcctccaggtttcagacttgacaggcttgaaactgccctgggtctccgcggcgcccagggcttgtga

SEQ ID NO: 4707 - protein, 80 aa, Myceliophthora thermophilia
MWQDSTAPSAESRLGGKASRRIFETRRCDSPFWAPKRGGRGGGNAGGGLQLATASAQVEPPGFRLDRLETALGLRGAQGL

SEQ ID NO: 4708 - DNA, 525 bp, Myceliophthora thermophilia
atgactattccgtacactatctatcccctcttgtttcgcagctcggcacgtttctttgctggcggcgatgcagtgatacggccgacgcagttcggagaactgagacggtcagcgacggtcgctctcgtcatcagagttccgccttctcctaaccatcgccacaactcacgccgaatccaaagcgcctaccgtaccacgtggctaagcttggccccctaccgcgacctacgccagtacggataccggagccatggttccttatacctgtcgtttgttgggccttgctcgacgctgtctcagccacaaccacccacggagctgggggaaacaacatcgcaaacacaggcgcttattagctatctgttcatacggcgtcgtctcaagcccgccacgatcatcaaccggatcctggcaggctcagagtcgtctgccagaatcaagagtcctgctgtgatcgaccttgtccttgccgccctgtccagccagaatctctccactcccatgacctctattgctcaaccgtga

SEQ ID NO: 4709 - protein, 174 aa, Myceliophthora thermophilia
MTIPYTIYPLLFRSSARFFAGGDAVIRPTQFGELRRSATVALVIRVPPSPNHRHNSRRIQSAYRTTWLSLAPYRDLRQYGYRSHGSLYLSFVGPCSTLSQPQPPTELGETTSQTQALISYLFIRRRLKPATIINRILAGSESSARIKSPAVIDLVLAALSSQNLSTPMTSIAQP

SEQ ID NO: 4710 - DNA, 957 bp, Myceliophthora thermophilia
atgcccagctccagatcatctgcgcagcacccacggcgggacttgtggatgtcctcgcagatgctcctacgacctaatatcgagagagacgacggggagattgagggccttagtcttgccagcatgggcgaggatccccttatctacttcctcactcctactccttcctcctatgtgggggatgacgatgtggacttggacatggactttgacgccgggatcgaggatgccaaacatccgccccctattattaggagcgttagtccgtcaagcctcggcggcctgagccggccccctccccgaccgccaacgccgccgaggtccccgtccactccggacctggactacagcctgtccgcgacgccggacgaacacgagcagtacggctacatggaggactcgtggccgccgcccaagcggggccactcgctgagcctccctcgccgcctcaaagacaagttcaagagccagccaaggcaagacgtcgccgggggtggcagcagcagcccggatagcctggcccctcccagcctctactcgacaggaaggggccgttccgcatctcgggctggctcgagaccagccggggcgggagcggttgcctccccctccccctcctccaactcgtactcttcgtgctccggggcggccaacagccggcccaggaccacgccgggccgcgtctcgccgcacgcgtggtgcgagccgagcccggacgtgtgggcgatcgaggaggagcctgaggaaggggggatgcatggcgaggcgggcggcggcggcggcggcggcggcagttttgcggaggaggaagaggagcgcggaggggcgggtagcggttctggcgtgtcgacgacaatggctgggaaagcgagggccttagacattccggctggaaagccaaagaagagggttcggttcgtgctgcctgctacggatgattacaggaacatgtattag

SEQ ID NO: 4711 - protein, 318 aa, Myceliophthora thermophilia
MPSSRSSAQHPRRDLWMSSQMLLRPNIERDDGEIEGLSLASMGEDPLIYFLTPTPSSYVGDDDVDLDMDFDAGIEDAKHPPPIIRSVSPSSLGGLSRPPPRPPTPPRSPSTPDLDYSLSATPDEHEQYGYMEDSWPPPKRGHSLSLPRRLKDKFKSQPRQDVAGGGSSSPDSLAPPSLYSTGRGRSASRAGSRPAGAGAVASPSPSSNSYSSCSGAANSRPRTTPGRVSPHAWCEPSPDVWAIEEEPEEGGMHGEAGGGGGGGGSFAEEEEERGGAGSGSGVSTTMAGKARALDIPAGKPKKRVRFVLPATDDYRNMY

SEQ ID NO: 4712 - DNA, 1503 bp, Myceliophthora thermophilia
atgtccagcacaacaactatggcggcgaatcagtcttcggcggtgaacccgcaactcgagtctcggctcgcccaagtcccgttggagattctcctgcggatcacctctcacatcacgacacccgatctcggaaacgtacgactgagttgccgagcgttggagaggagtctttttaactcgttcgcacacgagttcttccgcaagaagcaattcatggctaccacagacagcctccaagctctgatcgacatttccaaacatcccactctgtccccggtcctgaagcatgttatcctatccgtcgaccgccctttcattccctcatatcccttgtggaatcttagtaattctgacaggaatagcgaggcgagggcccgcttggaattggccaaagcggaccaaatgcatctgctggtcacgggcgggcttcgggacatgctagccgaggcattcgctaatcttgccaacctggagattgtcgacatccgcgatttcaactctcccagccgcagtcgggacggaccagggacacaatggacaagctggggcgccaaaacgctctcgaggttagccaacaccacggttcaacctaggctggagggggacgacgacccctacacgagtcaaatattcgccgccgccgtcgctggtctcgccgttgcacaggcccggccaaagagtctcgaggttcccatcaggggcagaggttacgctgctctcgctcttcacgacaccgccttctatatcccgccacgaatcgagggcccggtgtcgtcgcttctggccaatctcaagacgctccacctcacgctcgacttgacgcacccaaagagaatgaggttcttcatgctgcagcgattcttatcccgcaccatcaacctgacttggctgcgcctcaacttcaccttaaagtcccagcctcaagaccaggaggagttactcttgtggctggccctcaaggactcgaaaacccccgtagccccattcgacgccggccccatccagctcgcacatctggagcgcctcgacctgggaaccgtcgttctggaaccaagagttatcctcggcttggcttccaagttcgcgcccaccctgagatcgctgtacctgcgccaggtcagcctgcaggagtatgagaatgctagaaggaggccagaggacctggtcaacccgtggaagcggtgcttgaccgagctgagcagaatccgagggctgagcctgcgggtgctggatctgagcagcatcctcgttgggtgggaccggcagaggtgcggagtgtccttcaaagtttccgacgactctaccgcccagaattggacgtgctccaccgacaaaataagcttggagaaggccgtcgcgaaagcgatcgaggccatggttgtggaatggccgcgacaatcggaactccagcccatggatgacgactccgagggagaagaagacgaggacgaccaggagacaagcgatgaagaagaggagggcgaggacgaagaggacaactag

SEQ ID NO: 4713 - protein, 500 aa, Myceliophthora thermophilia
MSSTTTMAANQSSAVNPQLESRLAQVPLEILLRITSHITTPDLGNVRLSCRALERSLFNSFAHEFFRKKQFMATTDSLQALIDISKHPTLSPVLKHVILSVDRPFIPSYPLWNLSNSDRNSEARARLELAKADQMHLLVTGGLRDMLAEAFANLANLEIVDIRDFNSPSRSRDGPGTQWTSWGAKTLSRLANTTVQPRLEGDDDPYTSQIFAAAVAGLAVAQARPKSLEVPIRGRGYAALALHDTAFYIPPRIEGPVSSLLANLKTLHLTLDLTHPKRMRFFMLQRFLSRTINLTWLRLNFTLKSQPQDQEELLLWLALKDSKTPVAPFDAGPIQLAHLERLDLGTVVLEPRVILGLASKFAPTLRSLYLRQVSLQEYENARRRPEDLVNPWKRCLTELSRIRGLSLRVLDLSSILVGWDRQRCGVSFKVSDDSTAQNWTCSTDKISLEKAVAKAIEAMVVEWPRQSELQPMDDDSEGEEDEDDQETSDEEEEGEDEEDN

SEQ ID NO: 4714 - DNA, 1353 bp, Myceliophthora thermophilia
atgcctgactcgctccaaatccagctcgtcaaccagacgacatccaacgatgtatacgccttcatcaccgggctcgccatacgaaacaacatggcccgcgtatttcttggggcagacggaagaggcctctattaccccgaaccgccgccgcccggccggatcctgcagccgctgacccaagactgcgccatcccgctcggcccccccgggaacaccgtgaccgtgaccatcccgcagatggccggcgggcgcatctggtttagcgccgagaagcagctgaccttcctgcgcaacccgggcggacccggcggcggcgccgccctcgtcgaaccctccgtcctgaacccgagcgacccgaacgcgggcgtggacttcgccttttgtgagttcaccctcaacgacgaccagctgtttgccaacatcacctacgtcgacttcgtgccccgcctgcccgtctccctgaccctccggacgcgcgggggcgcggtccagcacgtcagcggcatggcacatgacggcctcgagagggtctgcgcaggcttgagggagcaggccgccagggacggttggccgtgggacaagctgatcgttcagcccgaagggcacgagagtcccctgagggcgttaaatcccacccacggcaatgcggttggcgccagtttcgacggctactttgaacccctcgtcgaggacgcgtggaggaaatactcggagtttctgcagccccagccccagccgcaacagcaacagcaacagcaggccgaaccatccgaggaaaagcgccgtcaccgattccagctttccttcctcagccgcgggaccgaccggttgcggccggctccgttctcttcatcaggactaccaccaccaataccaccgcggccacccaccaccctacgcatcaacacccaggcggcgccgggcgtcctcgaggggcgcgtccccgccgggtcggcggagctggtgatcggcggggagcggtttgcgcggccgacgacggccgacatcctggggtgcaacagcgggccgttcgcgccggggggggcgtcgccggcgcggctggccatcatcccgcggctggcggcggccttccagcgcggctgcgtctgcgccgtgcgcgaccacccctcggacccggccaccttctacccgcgcgacggccggccggcgaaccactacgcccgcgtcgtgcacgagtgcaacctggacggcaaggggtacgcgtttgcgtacgacgacgtccagcccgacggcggcgcggaccagagcggaaaggtgaatgccggcgacccggacttgctcatcgtcgccgtcggcggtcgcggcgcatacgtcggggataggatgccgtga

SEQ ID NO: 4715 - protein, 450 aa, Myceliophthora thermophilia
MPDSLQIQLVNQTTSNDVYAFITGLAIRNNMARVFLGADGRGLYYPEPPPPGRILQPLTQDCAIPLGPPGNTVTVTIPQMAGGRIWFSAEKQLTFLRNPGGPGGGAALVEPSVLNPSDPNAGVDFAFCEFTLNDDQLFANITYVDFVPRLPVSLTLRTRGGAVQHVSGMAHDGLERVCAGLREQAARDGWPWDKLIVQPEGHESPLRALNPTHGNAVGASFDGYFEPLVEDAWRKYSEFLQPQPQPQQQQQQQAEPSEEKRRHRFQLSFLSRGTDRLRPAPFSSSGLPPPIPPRPPTTLRINTQAAPGVLEGRVPAGSAELVIGGERFARPTTADILGCNSGPFAPGGASPARLAIIPRLAAAFQRGCVCAVRDHPSDPATFYPRDGRPANHYARVVHECNLDGKGYAFAYDDVQPDGGADQSGKVNAGDPDLLIVAVGGRGAYVGDRMP

SEQ ID NO: 4716 - DNA, 1668 bp, Myceliophthora thermophilia
atgcgctatgccgaactccgcgctacggtcgctcatctcgagcggtcccaatgccgatgtggacgcagcacctggagcaggctgaccaaatccatctttggcagtttctcaaaaccagcctcgaccctgcggtcacgaaaaaggtcaaaccactccgccgggatgccgtccacaggtcatggcgaacgtgttgccgagcttccacatcccgccgcgggccacgcagctcggattgccgagctcgacgtgagacgtcccctcgctgagttgcccgaccattcgtcgctcgcagagctctatggcagcaacccaacggatcgcggggatctcggagaaccccgggaccaaattgctcgttttcatgagcacaacactccaatttggcctggttttgcggagagcgaggcgcaatacccaagccaatgccttgcggccctcgggcataacactccttcgcctttcacacctttacccttctcacagtccgctcagtcctcaatatcaagcatccactcctcgagcattaccgattcgccctcggtcgttgtccccgaaaagcccatgtttacggcccatgttacagcttctcctaccgagcagagcggcggcatcgcatcttggcacacgaatccgtccatgccgcaccaagttcttcaggggccgtcgggcatagcggcggagctctcgggcagcccggtcggcctattagtgccagacatggccatgattcggcttccggagcaaaccatcggttctctgccggagctggagggtgataccccgcgcttaaggcccctgacacccgccgtgccccggaggaccgatcccatggctagcgatgtaatacctcagcagttttgggaattacccaccgtcgccgagactgagacggacttcaccatcaacggtgggaatccgccccaaacaactgggatggaaaggggcgcaacgatggctcagccggacggactccctccactacctctgcttgggcctccgcagccactgggcccccagggccggcaatactcgttcgactcgacggcagagacgattatcaacaaccgcgctgacgactcgccaacctcttctaccttcgaatttgccagctaccagggagagggctcgttcggcgtcccgcaggagcaatcgccggcatcgaccgcggtgtcgaccccggtatcgtcagcgccggcagcatcgccgacggtcgcccgcaagaggagaggagacgacgggcaggcgcgagacaataatcccctctactgcgagtcctgcgattactttcccaggggcgccgagccgaggcgcatgatgggcaggcacatcaagacggagggccaccgcatgaagacgggacagggaccctccgagcgacaccggtgtccgctctgccaggccacgcgaacccggcgggacaacctgcgggagcacatcaaggacaagcacggggaagaggccctgttgcagctgttgcagggtgccaactggcacaggcggccgcagccgccgccgcagcagcagcagcagcagcgggggaggaacctgagacgaaaggtacagggggcggtctcgaggcggatggggcaagcgaggctggcgcttgaccctctgagagcccaagtggcacattggccgttcggccctggaagtcacactgagagctga

SEQ ID NO: 4717 - protein, 555 aa, Myceliophthora thermophilia
MRYAELRATVAHLERSQCRCGRSTWSRLTKSIFGSFSKPASTLRSRKRSNHSAGMPSTGHGERVAELPHPAAGHAARIAELDVRRPLAELPDHSSLAELYGSNPTDRGDLGEPRDQIARFHEHNTPIWPGFAESEAQYPSQCLAALGHNTPSPFTPLPFSQSAQSSISSIHSSSITDSPSVVVPEKPMFTAHVTASPTEQSGGIASWHTNPSMPHQVLQGPSGIAAELSGSPVGLLVPDMAMIRLPEQTIGSLPELEGDTPRLRPLTPAVPRRTDPMASDVIPQQFWELPTVAETETDFTINGGNPPQTTGMERGATMAQPDGLPPLPLLGPPQPLGPQGRQYSFDSTAETIINNRADDSPTSSTFEFASYQGEGSFGVPQEQSPASTAVSTPVSSAPAASPTVARKRRGDDGQARDNNPLYCESCDYFPRGAEPRRMMGRHIKTEGHRMKTGQGPSERHRCPLCQATRTRRDNLREHIKDKHGEEALLQLLQGANWHRRPQPPPQQQQQQRGRNLRRKVQGAVSRRMGQARLALDPLRAQVAHWPFGPGSHTES

SEQ ID NO: 4718 - DNA, 525 bp, Myceliophthora thermophilia
atgcgcgacccgcacatcactgcaagctttgcatacacatatacatatacacctgataccttagccgcgatcgaatcttggccgccgtcggttgcctgcgaacaaatcggggcattggcgctcgccgcagctcatctccgcgtcgcgcggccgaccgacgacatcgacaggctgctgcccttctatcgagatggcctcggtttcgaggtattgggcagatttgccgaccacctaggctttgacggcgttgtgctcggccacaagtctgctgcttaccagattgaatttacaaaacttcggggccacgacgtcggccgggctccgacgcaggacaaccttctagtcttctaccttcccgacgacgatgcctacaccaaggcggtgacacgtatggaggaaaatgggtttcaagccgttgcaagcttcaacccctactgggaccgctacggcaagacctttgaggatccagacgggtacagagtggtgcttgccaacaggcccgctccgtttgcgtcttccccctga

SEQ ID NO: 4719 - protein, 174 aa, Myceliophthora thermophilia
MRDPHITASFAYTYTYTPDTLAAIESWPPSVACEQIGALALAAAHLRVARPTDDIDRLLPFYRDGLGFEVLGRFADHLGFDGVVLGHKSAAYQIEFTKLRGHDVGRAPTQDNLLVFYLPDDDAYTKAVTRMEENGFQAVASFNPYWDRYGKTFEDPDGYRVVLANRPAPFASSP

SEQ ID NO: 4720 - DNA, 2865 bp, Myceliophthora thermophilia
atgaacgagtcgccgtccgcccggactcccgggctctctgctccctcccggggccgccggctccggtcaacgtccgaatcatcacccacccgccaacggaacaccgacgaccttctttcgaaccttaccccgcggaccgtggtcgacgccttccggaacccctcgggaagcctgaaggcctgcatagaggcagcgaccccagccgagcaggccttcgcgctgagggtcgcaattgcctcgaacaccatccacgaatggctaagcgagctctcctcctggccatggccggctggcgggggctctgcgggctttgagatgcccgcagacaagaggaaagcgattccggggctcggcacatcccaggcctcggatcaagaatacaacggaagcctcccggcggccgacgttgcgagatacgaaaaacgaattgacgaaatcgcacaggggctggaggagctcaatatcgaagagatcaagagccaggtcctaaacaaccacatcttgcctttatcgcgcccgggaacccccgtcattgactcgggccgctccgcgatgtcgctctccagcattacaaggctcggcgatttgaccgccctggtcaccgccaccacactccaagccctgccggaactttcccggcttaccaagctgatgaatgcttggagccttcggctcctggtgctgcgaaagataccggtcttcctggcctcagtgtcagacgctgaggcggcgctgcagtctggctggaatgcgctcggccctgacaggcgtattcagagcggaagcacgggtgcgccatctgcggtgtcgcctctggatgatttggaggtgatgaagtccgttatcggacagaaagttgccaaggccggtcgcgacctggatgccatgctagacatcctggaaggacagcccgatacgctgccagaggactggatcgaccgagtggatacgctggagcatggctacggcgaatggactgtggcctgcgacaggaagatgaagcagaccgatctgattagctcgatagtgcaggccgctccggcgacgggcgcctccgtaccgcctcagcattcggaagcggatagaagcggcccgtcggttgccgccaacaagtcccttgcgtcagactccctggaacgggaacagacacaggtaccagagggagagcggccgcccgacggtgcacagaaaccggactcgagacccgacgtctccccgccggtcatcaagattcaatcaaccaccgaagaccaggcgcagacgccggaggacgactacccgaataccgacagtgaacttgtgcagagcgcatctgacggctcgagtggtgcggggccccacactgtgctcgcgtcggagccgtcgaaggcccatcacaaccatggagcaagacccgaggacgcccctgggtcttcgttcagctccgattctgagctgtgggacatctcagggcacggtgcgccccaaccagcccagagcggtagacgcgctagcggcgtctcggaatcttcgacggttttaaacgaagcgcccagcatgttcatggattccttttccagtgacctgctcgaccaaggagtttcggactcctttgatcatgggcgcgtggaccaggaggagggtcccaatcggtcactattgtcgaccagatcacggtcggtaagcttcaatgaccatcccacggtcacagagctgccgagcttccccagccctccaggcactccgacgacatcaacaaccctggatgatgacgacgcaacggaaccaggcacaccgtccgaaaggcagatgccaggcatggacgaccaacttcaacaacaaatcagcgagattctggaatcagtgccggctaagatccggctgaccgcagagcctcccgccgtcaatctcaacccaccagactttaaaatgccaacggcgcgcaggagctccaggtcggacgcaatcccgcgcacccagtccaacgggtccatgcggtccgtctactcccgctctgcgacgccctcgttcactctggcgcctgccagaaactcgcgtcctcgtcaccagcgcgacaacagagaaatcaaggtctatcacctctcccgttccaacggcgaggcgctaatcaaactcttcatccgctgcgtgggcgaacacggagagcgcgtcatggtccgcgtgggtggcggctgggccgaccttggggagtacctcaaagaatacgcaagccaccacctccggcgctccgctggcgccgccaccgacggtaaggtcgaggtcagagacatcccgcgcaccggttcggtgcgcccccctgacgccaccccgcccagccgcccggcctcggctatggacgcgcactcgcccgtctcgccgctgaaagtgcgcaagaccagacgctcgccgacagttaattcggacgagcaaaaccaccagcagctaccggcggcaatccggcccaagacacccctcgcaaacctgggcaggctggatgcgaccccgccctcggatgcgtcctcgtcgatgcgctcgcgctccagctcacgcatcagctgggaagaggacgacggtacgttcgcactaggcatggcggggccccgcgccaagcagatcgaaatgagcgaggaaagcagagcgtgggtggagagcatcaaggagaaggtgcgcattgcgagtagcgagcgaaagccgccgccgccgccgccgccttcttcttctttctcgtctgtaccgtccgtggccggtgccgagggaggtgcagcggcaggcggtgtcaagggcttggaggcgagcttgatggaccgtggagacgggagtggtagaactacgttcggggagttggggaaggtggggagtacaaagaggctgtttaaacggggttga

SEQ ID NO: 4721 - protein, 954 aa, Myceliophthora thermophilia
MNESPSARTPGLSAPSRGRRLRSTSESSPTRQRNTDDLLSNLTPRTVVDAFRNPSGSLKACIEAATPAEQAFALRVAIASNTIHEWLSELSSWPWPAGGGSAGFEMPADKRKAIPGLGTSQASDQEYNGSLPAADVARYEKRIDEIAQGLEELNIEEIKSQVLNNHILPLSRPGTPVIDSGRSAMSLSSITRLGDLTALVTATTLQALPELSRLTKLMNAWSLRLLVLRKIPVFLASVSDAEAALQSGWNALGPDRRIQSGSTGAPSAVSPLDDLEVMKSVIGQKVAKAGRDLDAMLDILEGQPDTLPEDWIDRVDTLEHGYGEWTVACDRKMKQTDLISSIVQAAPATGASVPPQHSEADRSGPSVAANKSLASDSLEREQTQVPEGERPPDGAQKPDSRPDVSPPVIKIQSTTEDQAQTPEDDYPNTDSELVQSASDGSSGAGPHTVLASEPSKAHHNHGARPEDAPGSSFSSDSELWDISGHGAPQPAQSGRRASGVSESSTVLNEAPSMFMDSFSSDLLDQGVSDSFDHGRVDQEEGPNRSLLSTRSRSVSFNDHPTVTELPSFPSPPGTPTTSTTLDDDDATEPGTPSERQMPGMDDQLQQQISEILESVPAKIRLTAEPPAVNLNPPDFKMPTARRSSRSDAIPRTQSNGSMRSVYSRSATPSFTLAPARNSRPRHQRDNREIKVYHLSRSNGEALIKLFIRCVGEHGERVMVRVGGGWADLGEYLKEYASHHLRRSAGAATDGKVEVRDIPRTGSVRPPDATPPSRPASAMDAHSPVSPLKVRKTRRSPTVNSDEQNHQQLPAAIRPKTPLANLGRLDATPPSDASSSMRSRSSSRISWEEDDGTFALGMAGPRAKQIEMSEESRAWVESIKEKVRIASSERKPPPPPPPSSSFSSVPSVAGAEGGAAAGGVKGLEASLMDRGDGSGRTTFGELGKVGSTKRLFKRG

SEQ ID NO: 4722 - DNA, 951 bp, Myceliophthora thermophilia
atgaaaccggggcatacaatgacgggtaagggagccggatcccttgtaacaccgcggccgcacagctcacacatccgcgcacgcaaagatggagagttaaacgcaggccggcagaaggatcaacccctggaaatcatgtttcgcatgtgcgactcccgagccgctggatcacaatgcggaccgctctggcccaaagcagatcgatgcggatgcgagaaccaagtgcattatagcgacagtgtggttggtagacgaaaacaacaagagctcaagcgcgccaacaactcaccgcgtcctcggcaaaagagggccaacacactgacgtcgttcaaaggggaacaagattcgctgctttcaccgatcttcgggctgctcaccttggcaacgacagcaagggggggggggtggttgtgtgccgtgcgtgattgggcgctgcgattgaaggaatggaacacaacgcacgcaggcagcgcggctcccttctttggaatcgaaactccgaaattccgttgcagaacaacaggggaaaaagaacaaccatccacctggagcgctgatctgtgccgcttcctctgtcggcctctaacattgccggcgagtcgagtcgtcgtgccgttgtgcgggagagaaatcggtgtggacctctggatcccaaacggaaaaagaacccagcctgaacctgcctgctgccgttttccggagacactagtcccaggagacggcttcaagaatacggattacctgctttggaaggagcggggcccccgtgaagcgcccgcagagtgtcgcttaggcgccgccccctgcctcttcaggggaactgtacggaccccgatgcccaggtctcagccaagatcctggggttcttcatgttctgaccagcgtgacggtcatcagtcccgagaaaacgtgattcacctgggctcgttgcatctcgagatgctccgctaa

SEQ ID NO: 4723 - protein, 316 aa, Myceliophthora thermophilia
MKPGHTMTGKGAGSLVTPRPHSSHIRARKDGELNAGRQKDQPLEIMFRMCDSRAAGSQCGPLWPKADRCGCENQVHYSDSVVGRRKQQELKRANNSPRPRQKRANTLTSFKGEQDSLLSPIFGLLTLATTARGGGWLCAVRDWALRLKEWNTTHAGSAAPFFGIETPKFRCRTTGEKEQPSTWSADLCRFLCRPLTLPASRVVVPLCGREIGVDLWIPNGKRTQPEPACCRFPETLVPGDGFKNTDYLLWKERGPREAPAECRLGAAPCLFRGTVRTPMPRSQPRSWGSSCSDQRDGHQSRENVIHLGSLHLEMLR

SEQ ID NO: 4724 - DNA, 1917 bp, Myceliophthora thermophilia
atggcacccgtctgcaccataccgggcacccccgacctctatggcatgggcatccgtgtctccttctacctcttgtggttcttcgtcctcatcggcgagcggtgccacgagcagcatgcccaagtccttcgcgccgccgagctggttcttgcctacgccgtctttctcggcttggccgtggccgtatcggcgggaagtctctttgccgccgaggtctatatcaccctccttctcatctcgacgaccgtgtacctgctggtgccccggcacaccactgatctcatggcgtggatccgtcctgatctcgggatcggaactcagcgtggcgggttcggtgttgttagagcagctcgattcctctccgtattgatcgtcattggtctgaacctctggttctggggggctggcgtcaagtctacgtcgattgacaggaatttgagagatcaaggcggttgctgtccttgccagcccccggctcaagttgggtttgcgttcgggccaattgagatgcagagcaggggtttcagggccatgaatgtcctcttgatgctagccctgctcgccgggggagtgattgttggcgcgatgaagactgggctcatcaagaacagaaggtcaagaaggcgaaggagagctaaccgctcccggattcgagtcttaaaggaagtcgagactttcggggggctgacagttgcgtgcgtcctcgtcgccgctactgaactgacgatcaaatggaacaagatctcgggtgccgtcaaccaggtttcgactgccgcgcaatttataccgccggggattgtcgtagcgttgatcttgacctttctatccgacctaaagaatggttccgctgaatcagggaacagcgacagtggcggcagcgggaccggcagcgggaccggcagcggcagcagtggtgttggcagcagcttgcccgtgggctcttcaggcccatcttcctcttcgagcggctggaccaagcctgtgagatactcaaggccatgggcgccctcgtcgccctacccatctgttcatttccctgtctctatcattgcttctcctcccgcgacatttgtcccagatgctgctccagctccaagctcgagtgcatatatctctcgtccgcctcccgattttgacaaggaccatccacctcccgactttgacagagaacatccgcccccggattttgacatggagcatccggcccctgatttcggccccttcactccacatcccgcttttaccgcagcgatccgcatctcgatccgctttccagcaaccaccgggacggtcttcagtagagacaaccactcggccaccgataaaccctatcatcatcagcgtgtctccgccaagaaaacagcggccaaaggggccacggccaatgtgaagcctccctgtcttcaattcgggctggttgctccaatcatttcggaaagatactcggcgtctacggtcgcgacaaccctccaccaaagcgccaccatgcgcctggcccaggcgcacgccgacctctcccgccgactcacacaaacgctggtcaagagcgacgcggcctttctcgagtccaccgaggcgcacgtcagaaaactcacccagccgctggacgcggtccgcatccggtcgcagcagcgcggccgcgacggggcgctgcggagtgaggagagcaccgtgggtgagctggtcgcccgcgccgaagagcagttgcgggagtttgagaagtgcatggcggagctctgggcggagtgggctgttgccgacgaggaggctattgagcggcagattgaggaggctgaagaggaggctgttgacctgggagagaaggcgctggccttgatgaaggggatcgaaaaagactttcgaaaggagacgctaccggatctgcataccttcttccagtccatcgacgagccgtaa

SEQ ID NO: 4725 - protein, 638 aa, Myceliophthora thermophilia
MAPVCTIPGTPDLYGMGIRVSFYLLWFFVLIGERCHEQHAQVLRAAELVLAYAVFLGLAVAVSAGSLFAAEVYITLLLISTTVYLLVPRHTTDLMAWIRPDLGIGTQRGGFGVVRAARFLSVLIVIGLNLWFWGAGVKSTSIDRNLRDQGGCCPCQPPAQVGFAFGPIEMQSRGFRAMNVLLMLALLAGGVIVGAMKTGLIKNRRSRRRRRANRSRIRVLKEVETFGGLTVACVLVAATELTIKWNKISGAVNQVSTAAQFIPPGIVVALILTFLSDLKNGSAESGNSDSGGSGTGSGTGSGSSGVGSSLPVGSSGPSSSSSGWTKPVRYSRPWAPSSPYPSVHFPVSIIASPPATFVPDAAPAPSSSAYISRPPPDFDKDHPPPDFDREHPPPDFDMEHPAPDFGPFTPHPAFTAAIRISIRFPATTGTVFSRDNHSATDKPYHHQRVSAKKTAAKGATANVKPPCLQFGLVAPIISERYSASTVATTLHQSATMRLAQAHADLSRRLTQTLVKSDAAFLESTEAHVRKLTQPLDAVRIRSQQRGRDGALRSEESTVGELVARAEEQLREFEKCMAELWAEWAVADEEAIERQIEEAEEEAVDLGEKALALMKGIEKDFRKETLPDLHTFFQSIDEP

SEQ ID NO: 4726 - DNA, 783 bp, Myceliophthora thermophilia
atggccgtgtttgtgaatctggaatcggaggacagcggggtttctcaggacgggaagccgcagtggccaagcgccgtcgacgctgtcaagcagttccctgcatcgacagccagctcgggtcctcccgccgggagtgccaccagcagtgccgacaatgctgtgggaaagcaacacgaggaggctcatgagcccgcggccggggaggatccgaaccagaactccatggcgcaggctttgggatgctaccccatcatcatgtcggtggccgcttccatcgacctgaacactctcgatagcctgtcgcggacctgtcgccggattcgccgtggcctcctgccgtaccgcaagatgctgctggcctcgaccttgcgttgcgtcaacgagaacctcccggtcgacccggaggacactttgcgctaccgagcccgcgccagcaactggtggtacatgcaggatgcggcgagatcgacctacaacggcaagtcgggccagtgtgcccgcgacatggtggccgagtgtcgtcgatgcggcaccgtcgtctgtcggaactgtgcgatcaaacctccagccccaatagccctacgggaccgccaccggcgtctctgcgaagcgtgtgtgaatgcacccctgggttcccttgccagaccgcggctcgggccggaaatccgtatcgactcagatgaaatggagcgcgcgatctgcaggtgcgactctacgggcgtctggctttgccagccctgtgggcggtccatccagggcgacgattacgagtataaggggtaa

SEQ ID NO: 4727 - protein, 260 aa, Myceliophthora thermophilia
MAVFVNLESEDSGVSQDGKPQWPSAVDAVKQFPASTASSGPPAGSATSSADNAVGKQHEEAHEPAAGEDPNQNSMAQALGCYPIIMSVAASIDLNTLDSLSRTCRRIRRGLLPYRKMLLASTLRCVNENLPVDPEDTLRYRARASNWWYMQDAARSTYNGKSGQCARDMVAECRRCGTVVCRNCAIKPPAPIALRDRHRRLCEACVNAPLGSLARPRLGPEIRIDSDEMERAICRCDSTGVWLCQPCGRSIQGDDYEYKG

SEQ ID NO: 4728 - DNA, 1662 bp, Myceliophthora thermophilia
atgcttgcctccaatgcttctgggatgttttccttttgtcaaacaggaccagcggacctggcaggttcgtcctgggatgcgacagttgaaggatcacagaacttccctgagcttgcagatgccgcggactattattctggagaaaccgaggactttgttcttccctttggccagaacacccccaagccggaccacctggatgccgcggatgagtttcagaccaaatggactcctgccgtctcactcgagagcaaggctctgaaggcagagcccatgaggagagggacttcacgcagctccacggggagccacaagaataggagcaccaaggtctccacccagtcagccaagaagagccggtcaagagttcagagcgttctgtctcaggcttcttcgcagatgtccaagcttgacatgtcaagtaacgcgtcgactcacgcccagggccgcattatggatgttcagcaataccttgcgcaggatctggatactctgtctgtctcgcctcaggtaactaacgctgcgttttactcgggtcttggggtcttcgcggatggactgccctattctggcgacattggcgctactatggcccagcatgtgaatccacaaatcttcgatgctggtctcatcgccgcctcgccacactcctggggctcgctgagccctgttgactcgcggatgtcttcccccggaattcaggatggatcagatgatgtttggtctgcggctccatccgcttcttctccaggagagagccaaaactcaaactcgccggcgctgccaggccagtcacccaggatgagccgcaaactggacgcttcacagtatgttagctccgatgaggtgcaaggccagatgatgcccgccatgggagaggatggctttgcccttcctcacgctgcctttggctctcgccgtgccagcggcgaaggtgagtctgcacgggaccattacctgtacaagaatgcgttcccccaagcggacggccttttccactgcccatgggagggccaggctagctgcaaccacaagcccgagaagctcaagtgcaactacgacaaatttgtggattcccaccttaagccttatcgctgcaaggttgatggttgccagaatgcccgtttctcttccactgcctgcctgctacgccatgagcgagaggctcacgccatgcatggccatggcgagaagccctacctctgcacgtacgagggctgtgagcgctccattcccggccacggcttccctcgccaatggaacctgagggaccacatgagacgcgtgcacaacgataacgggaccactacccaggcagcgtctcctccctcgggggccgccgccgcgtccaggggccggaagaggaagaacgatgccccggagaagtcgcccagtcaggagaagcccagctccaggaagtcatccaaggctgccgcagagccagaggccccggctccaaaacaacccgaggttgtctctcaccccgagctcgaccagtggtatgagcatcaaaaggccctgcagtcctttattcagggctgtgcccagccggacgacccgcagaccctccagtacatcaaggatgcccagaaacacctcaatgccatgggaaagatctcgcacggcctggtccagggatcccgccgctcgtggactggttga

SEQ ID NO: 4729 - protein, 553 aa, Myceliophthora thermophilia
MLASNASGMFSFCQTGPADLAGSSWDATVEGSQNFPELADAADYYSGETEDFVLPFGQNTPKPDHLDAADEFQTKWTPAVSLESKALKAEPMRRGTSRSSTGSHKNRSTKVSTQSAKKSRSRVQSVLSQASSQMSKLDMSSNASTHAQGRIMDVQQYLAQDLDTLSVSPQVTNAAFYSGLGVFADGLPYSGDIGATMAQHVNPQIFDAGLIAASPHSWGSLSPVDSRMSSPGIQDGSDDVWSAAPSASSPGESQNSNSPALPGQSPRMSRKLDASQYVSSDEVQGQMMPAMGEDGFALPHAAFGSRRASGEGESARDHYLYKNAFPQADGLFHCPWEGQASCNHKPEKLKCNYDKFVDSHLKPYRCKVDGCQNARFSSTACLLRHEREAHAMHGHGEKPYLCTYEGCERSIPGHGFPRQWNLRDHMRRVHNDNGTTTQAASPPSGAAAASRGRKRKNDAPEKSPSQEKPSSRKSSKAAAEPEAPAPKQPEVVSHPELDQWYEHQKALQSFIQGCAQPDDPQTLQYIKDAQKHLNAMGKISHGLVQGSRRSWTG

SEQ ID NO: 4730 - DNA, 561 bp, Myceliophthora thermophilia
atgtcacaacaacaacaagacgccaacgccgaagaagtcgtgccagtccccaaggttggggaccgcgccccgtctctgggcaaggacatcgacttcccgcacgacaagcctctgctcgtcgtcttcttgcggcactgcggctgccctttcgcggagaagacgttcaagttgctcaccaacttgtcgaaccatcacccggaggtccactgcgtcgccgtttcacagtcggaccaaaaggatacggacgagtgggtcgtgcaagtagggggcgaatgggatgtccaggtgctccccgacccgcagcgcgagctctaccacgcctggggcctcggcctgagctcgacatggtacgccatgaaccccatggcgctgtggcgtacgtggaagctgggaactgaggaagggatatggaaccgaaatgcccaaggcggcagcaagtggcagatcggcggggcgtttggtgttgatcgtgaaggtattgttcggtggtcgaagccggcagcgagtgcagacgagataccggatttcaaggaggcgctgaaggttttgaccggaaattaa

SEQ ID NO: 4731 - protein, 186 aa, Myceliophthora thermophilia
MSQQQQDANAEEVVPVPKVGDRAPSLGKDIDFPHDKPLLVVFLRHCGCPFAEKTFKLLTNLSNHHPEVHCVAVSQSDQKDTDEWVVQVGGEWDVQVLPDPQRELYHAWGLGLSSTWYAMNPMALWRTWKLGTEEGIWNRNAQGGSKWQIGGAFGVDREGIVRWSKPAASADEIPDFKEALKVLTGN

SEQ ID NO: 4732 - DNA, 240 bp, Myceliophthora thermophilia
atgcctgttgtggaacccgcctcaggctacgccaccgagaacacaaccgcgcccatgcttcgggcccgagaagccggcccgcccgtagcccgggcccgagtcctagttgcgtttaccgcaagaacgtccaacacaacctcaaccacgccccactgcgactccaacttgtttaaaacaggtagtgtagtggtggtctgcgaacgcctgggagtcatctctcgctcaggaaacccagaatga

SEQ ID NO: 4733 - protein, 79 aa, Myceliophthora thermophilia
MPVVEPASGYATENTTAPMLRAREAGPPVARARVLVAFTARTSNTTSTTPHCDSNLFKTGSVVVVCERLGVISRSGNPE

SEQ ID NO: 4734 - DNA, 429 bp, Myceliophthora thermophilia
atgcaagacaggcgatgcaagcacttggtcaccgccgtcgggctagtcggccaacatccgcagcggcagtcgccatttccgtgtctctgccccgtgttccaactttttttgctctttttctccgatggggcggagatggggcgaaaccaggggcaggcaggggcagacttgcgggaaaaagggaacggaattggagggaataccgggctctatatatatcagggccaggaaccaagcggcgggcccgtcgtcttatcgtggtacagaggtccatgtccagcgaatgacaacaagcaaaccgccagccgctcagcagggcggaccaaggtcatcatggcaagcgagtcaacgatggctcaccaggggctgccgactcttctctgcaactcgtcgcatcacagagcaccgctgcctaggctcctggcgtga

SEQ ID NO: 4735 - protein, 142 aa, Myceliophthora thermophilia
MQDRRCKHLVTAVGLVGQHPQRQSPFPCLCPVFQLFLLFFSDGAEMGRNQGQAGADLREKGNGIGGNTGLYIYQGQEPSGGPVVLSWYRGPCPANDNKQTASRSAGRTKVIMASESTMAHQGLPTLLCNSSHHRAPLPRLLA

SEQ ID NO: 4736 - DNA, 561 bp, Myceliophthora thermophilia
atggcggtattatcaataacactcggcgggactcggctgctccttcctcctttccacccctccctccgtcgctttccctctccatttccactctcactttccgactttcgaaacaaggagaaacaaagaaaaggagacgcccacaccctcccgccgacacacgatacggatcgtgagggcaattacgcaagaatgggatctcccgatgagggccgctaccgtcgccgccgccgccgccgccgccgcccgtccggcatccttagcggcttcgggatctcgcagatcgttcttatcaagcgaaccgcttcctctgcatccaccacgggctcagcagcacccttgtcgactggaaggtcttgcgcggcgggggcgcagaacaagcttgtttccatggcgatatgcatatcagacgacccaatcacggatgtgatccgcccggctctccatactaccctatatatggcatctttgactctcgacgggttaggaccagaaacggttaatactctgggtgggagcttatggccatcgtgcatcaggatgacaacatcagattcctaa

SEQ ID NO: 4737 - protein, 186 aa, Myceliophthora thermophilia
MAVLSITLGGTRLLLPPFHPSLRRFPSPFPLSLSDFRNKEKQRKGDAHTLPPTHDTDREGNYARMGSPDEGRYRRRRRRRRRPSGILSGFGISQIVLIKRTASSASTTGSAAPLSTGRSCAAGAQNKLVSMAICISDDPITDVIRPALHTTLYMASLTLDGLGPETVNTLGGSLWPSCIRMTTSDS

SEQ ID NO: 4738 - DNA, 444 bp, Myceliophthora thermophilia
atgaggaccgtaacccgtggccgcgttgggtcacgattccgtcgcgcggcctggatgtgcgagctggagatcggtgtggccgcgtacgttgggcggtaccaccaaaagaaatacagccagctccaccggacagacgccctgattgcgcctggtgcgacctacctcacgtgtaggcactcataccaatgtcgtctcggtcgtgatccaaaaacacgccgacaggtcatctttgccgccgtgatggatgggttcatcaacatcgcatccgccctcggttattacgaggccatcgggctctgcttctcggccgtcctcgacctcgtcccagctgccttgtgctgcgccggggctctaagcattgcgtggccggaaaggggcccagacaaccccttgactggcgcccaggatgtgtcgacgacactattagtggctgtcgtgtggtaa

SEQ ID NO: 4739 - protein, 147 aa, Myceliophthora thermophilia
MRTVTRGRVGSRFRRAAWMCELEIGVAAYVGRYHQKKYSQLHRTDALIAPGATYLTCRHSYQCRLGRDPKTRRQVIFAAVMDGFINIASALGYYEAIGLCFSAVLDLVPAALCCAGALSIAWPERGPDNPLTGAQDVSTTLLVAVVW

SEQ ID NO: 4740 - DNA, 1620 bp, Myceliophthora thermophilia
atgagcaagtcgctcgtccatgatgcggccacttcagcagaggctgcctcgacggcgcctcgaccgaagccaaagagggtacaagtctcgagggcgtgtcaaaggtgcaagaggctgcagaagggctgcagcgagtcccggccgtgccagcggtgcgtgcgggtcggcctcgagtacgagtgcctgcgggaccccgggaggcaagctcggcgatcggcgacggcggggatggctactactattaataccaatagtagtagtagtagtcgagcatggtcatcatatccgcacctccccgcgagcctctcgcccgaaaccgcccacgcgtccccgcttaccgggtcattgccaccgctgctgctgccgccgccgccgccgccgccgccgccgtcgccgagacggagcctgcctcccggcatcgtgatccggtactgcttccagcgcttcttcgccaagctgtaccccaccatcccgatcctgacccccgagtacgccgacctgctggtcgccgaggccgagtcgcaccgcggggccgaggcccagtgcctcgtcacggccgtgtgcgccgtcgtgctgctccaggtcgaggagccggaccggcgcccgttcgaggccgccgggatcccgcactcgaaccgccatttcggcgagctgctcttcgaggacgccatggcctcccgcgtccacctctcctccagcgcgttcaaccccagcctggagcgcaccctggccaccttcttcctctacgccggccacgcctcgctcttccaccacagccagggcttctttttcctccgcgaggccgccaccctctgcctcgtcctgcgcatccgcgacggtgacctcctcaggcggaagctggccgacaggctcttctggatcatcctggtgtcggagcgctcccacgggatccgctaccgccggcccgtcacgctgcaggtcgtcccgtcgggccccgccctcgaggccgagtccgagtccgggtccgggtccgggtccgggtccgggtcggagccggacacggccctggccgggctgcgccgcctcgtgtccctcttccgccctctcgacaccgccttcttctccctgctcaaccgggaggagacgacggtgttcgggtcgcggctggtgtcgtcgtcgctcgacgccatccaggccgccatccgcggcgccctcgagccgcagcacacgggcttgctctgcgagacgcagcttgccaacctcagggtcacgcagctctggctgctcgtcatcctgtggcagctccggctgcggctgggcttgctgatggaggagcccggcatcccgtgccacctgaccttccactacccggtcgagctgggcgaggagctggtcggcgtggtccgggccatctctgtcgagagcatccggatccacggcgtcggcatcaacgaaaagatcttcgacgtcgcctgcgccatggtcgacgtgctctcccgcgtgccggccaccgacaagcgggggaccgggcgggagaatatcaggtacttccgggacctgatcctgaagctcccgggcggcgtgtccacctacggggcgctcctcgacaaacacatcagcaacacattaccgaaccttttggtgcagtccggtaattaa

SEQ ID NO: 4741 - protein, 539 aa, Myceliophthora thermophilia
MSKSLVHDAATSAEAASTAPRPKPKRVQVSRACQRCKRLQKGCSESRPCQRCVRVGLEYECLRDPGRQARRSATAGMATTINTNSSSSSRAWSSYPHLPASLSPETAHASPLTGSLPPLLLPPPPPPPPPSPRRSLPPGIVIRYCFQRFFAKLYPTIPILTPEYADLLVAEAESHRGAEAQCLVTAVCAVVLLQVEEPDRRPFEAAGIPHSNRHFGELLFEDAMASRVHLSSSAFNPSLERTLATFFLYAGHASLFHHSQGFFFLREAATLCLVLRIRDGDLLRRKLADRLFWIILVSERSHGIRYRRPVTLQVVPSGPALEAESESGSGSGSGSGSEPDTALAGLRRLVSLFRPLDTAFFSLLNREETTVFGSRLVSSSLDAIQAAIRGALEPQHTGLLCETQLANLRVTQLWLLVILWQLRLRLGLLMEEPGIPCHLTFHYPVELGEELVGVVRAISVESIRIHGVGINEKIFDVACAMVDVLSRVPATDKRGTGRENIRYFRDLILKLPGGVSTYGALLDKHISNTLPNLLVQSGN

SEQ ID NO: 4742 - DNA, 1077 bp, Myceliophthora thermophilia
atggcggacgcgcgcgatccggctggtgctgttggccagcccgaccacagcacgctcgaggttgtcgagggacactaccacgacaaggcagtcttcagcaagaatgacaaagtcgcctacgtcccctcccgcggggactacaaggtagtcgtccagcaagagaccgacgctcagaagcccgccacgccgggcgcctacagcgaccagaaccagcccgagcagtattccccccagacgacgtatgccccaggcgcatctgcctgggaaggagacgccttctcggcgagggaacctccgcagacggacgggggaggcaagaagattcttggattgaagaggcggacctgtttcaccgtcatgtgggtcgcctccctcctggtggccatcggcgtcggcgtcggcgtcggcgtcggcgtctcgatgcgttcaagcagcggcagcggcagcggcagcggcggcagcgacgaaggggccgacctggggtccgactccgccatgcctccgcggacgacgactccggggagcacgggggccggctcggccgacagcagcagcagcgtgaccgtgaccgggtcggcctcgcggggcgcgaccccgagctccgtgaccctcacggcgccgcggagcacggcggcggtgcagatcggcggcgtcggcgggaggtgctccaacaactggggcgccgactgcatctgcctcgaccgcgacgtctgcgtcaaccggtggcagggcgagcccatgacgggcaccggccccggcgactggccctgccccgatgatcccaacaacatcgtcgcctgcatcgtcaagccctgcctgggcaagccggaggggtcgcagtgcatgtggagcgaggcgtgcaggcaggtagataacagaacgcagaccgcttcatctcgcgggagaagggcaaaccgcgactgcctcgaagaaccggcgtccgcggcaagagcccaaggcgtcagggctcagcacggaatcttgttatgcctgtttaatcaacatacccgggctgtccctgaaaccgaccagcagcaaaggaccttagcaaagcccctcgagttcagtgcttactaa

SEQ ID NO: 4743 - protein, 358 aa, Myceliophthora thermophilia
MADARDPAGAVGQPDHSTLEVVEGHYHDKAVFSKNDKVAYVPSRGDYKVVVQQETDAQKPATPGAYSDQNQPEQYSPQTTYAPGASAWEGDAFSAREPPQTDGGGKKILGLKRRTCFTVMWVASLLVAIGVGVGVGVGVSMRSSSGSGSGSGGSDEGADLGSDSAMPPRTTTPGSTGAGSADSSSSVTVTGSASRGATPSSVTLTAPRSTAAVQIGGVGGRCSNNWGADCICLDRDVCVNRWQGEPMTGTGPGDWPCPDDPNNIVACIVKPCLGKPEGSQCMWSEACRQVDNRTQTASSRGRRANRDCLEEPASAARAQGVRAQHGILLCLFNQHTRAVPETDQQQRTLAKPLEFSAY

SEQ ID NO: 4744 - DNA, 2553 bp, Myceliophthora thermophilia
atggcgccgaaggatagtaaggcgggtgaactagagcggaaggcgtcgacgaggaggtcggcgagggtatccctcgatgacggaaacgatggggacgatctcgccctggaaagcacgatcgcggatggattccgaccgacacatgccagcggctccgggacgccgtcagtaacgtcagggacgtcagcgaggtccgcgccgtcaacgccgcccctcacctcagcgtcgtctaccacactcgtcagtagggaagacccggcatcgccagcgacaagtggcggctcctcgagtacgggaaaaccccaggctccgcagttttcgttgctggttcaaggggaggccaattcgctcaaccgtcagataacgaactcgaccgggtcaagtgtctacattccccacgatggcccgtaccgagggccgtccgccgcatcccacccttatcacctctatacgcagagcgtgaggccggcgagaacgttgagcatgggaacgtcgtcaaccgttcccttgtcggagtcatcctaccgggggccgacgggaccgagccacccttacggactctatccccaagtcgacagcatcgaggcagatgcggcacaggctgcgatacccttaggtttccgcggcctccctgaccaataccaacggcgagtggggcccgagggcgaggagattggagacattatcggccccgacggacacacagagcagcttccgccatacaccaggtatccggatgaggcctatgtgcgtaaggccgcggcggtcgaaggatgccccggcttggttcatggtgctgcaacagccctgccccccattctcacaagttctgcatcaaccattccaccgctggacggcgccgggggcatcgggctggcgaccaggaaccccgagttcgagtcgacggacgacccaggctccccgggttcgcgccactcgacgcgcagcttcagatcggatgacagtcggcggggcattaggatggacgacgagggcttgtcagaaaaaagggaaccaccgaagaaatggcaggcctggatgaggagaaaagcttgcggcatcattccttactgggccatatgcctcactgcgatcatcttgctggtgatgctggtagcattaggcgtcgtggttggaaccgtattaagtaataacaacaagcagaagccgcctcctccatgggaacaaggggactggaaaccaccgtccgacgtgacgcctatcccaacgccgacggacctgcaacccctagctacgggaaccttcgggctcccactcctgacgaaccgcgtctccaacacgtgcctcaagaatccaaccctgtctatggcatggaactgtcacatcgtcctctcgggcatgactttgaatgtcaccaaagagaataaggactaccgcgcttcgttggactgcaaccacgcgctcacctcgaagggcaacacctacgcctacggcgagcagccgccattgcttgagaagcccgtcaaactgaagctggtccaggacaatttcgaagcaggccgcggccccgcgtggtacaagagggtgaagtacaccaagacggtcattctgccggaagggtggcttgaatcagaccaagacccaattgcgttgaagagggcgccttacactgcgacgattggggcgagtatgccagatttcaaacgcaaagggatcgcgcagcccggcgacaagccctggatatgtacttggccggacacatggctggagctcttcatttacgcccagcagaactcgagttttgccaactggccacccgagcctccaccgccgtcgtcaacggcaggaaattcgagcagcacgcccagcacacccccaccgagttcttcgccgtcaacatccaccgacggacccgactcgtcctccgagaagggctcccaccggtttcaggatggccacaagaccgacgacgcagactcttgggacatgtcatatcactcgctagagattcacgcgcgctcggagggcgctggcccgacgacaccaccgcccgacacagccagcacgaccgtcgaggccacttcgacatggaacacggcaacggcgtcggatccgttcgggcccatcgacacaggcagtgacttcccgcacatagcgcaaccgtatccgcgggtcgtcaagctcgaggagcgccggatgtggaccaaggacgcgccccgtgcgcagtgcacgcaggtgcagatcatgggccccgggcaggaggcacagccgctgcagaggccggacgggaagttggtggttatggacatcgaggaggtgggcccgttcggtggcgggtcgccagagggggagttcccggacaaaaagatgacggacggggtctgggagaggtcggattgggaagaggacgaagacgattgggagcaagcggtgggcgacggtgaagagtttggaatagacggattgccggatatcatcacaaccaacatcgtcaccgccgccgccgccgccgccgccgccgccaccgccgccgagaaacttgccaaagaagaaccctctcttccgcgcttggggagcttgatgcggttgtga

SEQ ID NO: 4745 - protein, 850 aa, Myceliophthora thermophilia
MAPKDSKAGELERKASTRRSARVSLDDGNDGDDLALESTIADGFRPTHASGSGTPSVTSGTSARSAPSTPPLTSASSTTLVSREDPASPATSGGSSSTGKPQAPQFSLLVQGEANSLNRQITNSTGSSVYIPHDGPYRGPSAASHPYHLYTQSVRPARTLSMGTSSTVPLSESSYRGPTGPSHPYGLYPQVDSIEADAAQAAIPLGFRGLPDQYQRRVGPEGEEIGDIIGPDGHTEQLPPYTRYPDEAYVRKAAAVEGCPGLVHGAATALPPILTSSASTIPPLDGAGGIGLATRNPEFESTDDPGSPGSRHSTRSFRSDDSRRGIRMDDEGLSEKREPPKKWQAWMRRKACGIIPYWAICLTAIILLVMLVALGVVVGTVLSNNNKQKPPPPWEQGDWKPPSDVTPIPTPTDLQPLATGTFGLPLLTNRVSNTCLKNPTLSMAWNCHIVLSGMTLNVTKENKDYRASLDCNHALTSKGNTYAYGEQPPLLEKPVKLKLVQDNFEAGRGPAWYKRVKYTKTVILPEGWLESDQDPIALKRAPYTATIGASMPDFKRKGIAQPGDKPWICTWPDTWLELFIYAQQNSSFANWPPEPPPPSSTAGNSSSTPSTPPPSSSPSTSTDGPDSSSEKGSHRFQDGHKTDDADSWDMSYHSLEIHARSEGAGPTTPPPDTASTTVEATSTWNTATASDPFGPIDTGSDFPHIAQPYPRVVKLEERRMWTKDAPRAQCTQVQIMGPGQEAQPLQRPDGKLVVMDIEEVGPFGGGSPEGEFPDKKMTDGVWERSDWEEDEDDWEQAVGDGEEFGIDGLPDIITTNIVTAAAAAAAAATAAEKLAKEEPSLPRLGSLMRL

SEQ ID NO: 4746 - DNA, 381 bp, Myceliophthora thermophilia
atgtctagggtatcaagaaaatctaccacctttacctcccctacctaccataagattactaaccagggcgcctattataccatcctaatgcctaagttctctatactacatataaacgagaacatgtcgactttagttaacactaatactacccttattgcctacatcttaggtactttgtcgcctgcttcctacgcctgcccctatacctctatataccctatacctataccgatcgactttggccgttcctatgcctactactcttccttacttactaagtataaggcgtacctagtccgtaactataataaccctacccttgacactataactattattttagagggggaagataaggaggaagaggttatagagtag

SEQ ID NO: 4747 - protein, 126 aa, Myceliophthora thermophilia
MSRVSRKSTTFTSPTYHKITNQGAYYTILMPKFSILHINENMSTLVNTNTTLIAYILGTLSPASYACPYTSIYPIPIPIDFGRSYAYYSSLLTKYKAYLVRNYNNPTLDTITIILEGEDKEEEVIE

SEQ ID NO: 4748 - DNA, 255 bp, Myceliophthora thermophilia
atgtatggattccgctctccgtgtttcacagatacactgactcctctgtatccgcccctcagccctgcgggcgatctccccaaagcgccaatcgcacaacggttccaggcaaccacttcggggcctcagaactgccaagcctccccagccatcctgctgacaccccagtccgggaccgccatgtgtgaacaggatcaacggaccctccagtggtcaacatcgcccatccagcttccgatcccggcctttctttaa

SEQ ID NO: 4749 - protein, 84 aa, Myceliophthora thermophilia
MYGFRSPCFTDTLTPLYPPLSPAGDLPKAPIAQRFQATTSGPQNCQASPAILLTPQSGTAMCEQDQRTLQWSTSPIQLPIPAFL

SEQ ID NO: 4750 - DNA, 459 bp, Myceliophthora thermophilia
atggagaacaactcaacgtccatcactattcccgaacaacgccatcgggcggtccacgccgaggccggatcctcgccgtcgtcatactcgagctcgccgagctcctcgccagaaccgtcgaccaaggcggcacagaagcggaagctactgcatactagacgaccgagcctgctgagtcggtcgccttctctgcaggaaacgtgcaacccccagctaacgttattggcaggctcggccttcacccagcaagaatgcacgaccatcaagatcggtgacgatccggaggggcctatgcgactgattacctacctctcttccgaccagggctttgtctggaaccccgagatctttgtgccgtcgttttgtgattacgactacgtcccactcgagcaacgccgcgatcccgtccatgaaatctacctgagcgacgaggagatcaaaaagatactgccgcaatga

SEQ ID NO: 4751 - protein, 152 aa, Myceliophthora thermophilia
MENNSTSITIPEQRHRAVHAEAGSSPSSYSSSPSSSPEPSTKAAQKRKLLHTRRPSLLSRSPSLQETCNPQLTLLAGSAFTQQECTTIKIGDDPEGPMRLITYLSSDQGFVWNPEIFVPSFCDYDYVPLEQRRDPVHEIYLSDEEIKKILPQ

SEQ ID NO: 4752 - DNA, 1656 bp, Myceliophthora thermophilia
atgcgctacgacgactgggatgtcattctattccccgcgggccgagactcaaaaataccattcaaggagttcagggtcgcctgccatgtcgttcctgacctcgagctggcccacatccatggcgctgtgggcattcccgtcatgacttgctttgttccgagcctggcgccaggcaccgcatttcagatatccatccactgctggcgcaagcccaaccttagccaattcactcgtgcatatagcaagcacacggagctgatcaaattcgaagctcgcattctaatcgatggacgactggttgcatccaccgtccttgatcgtgaagtcaacggcccgcatctaattacgagcacatgtgagttcaccaagacgggcgaactcgaacggctgaggttcccgcactttcgccgcgaactgctgtaccaaaaccactggagaccaggcgacgatatcggccgcatcaagcttgttataagcgaaggatttcctcgagactcgctctcagccccgattgagcgagttaaaaacgtcgtggcgttctcgttccagcatgctccgttagaaatactcgagagcaatgccatcgcctggccaaaccaatccatgtggcaatgttcaggacttaacccggtgatgcccgtacccacgtatcagttagaggacgggccgagctcgcatgcgcattcccctggcaggaattcgctcccgctaaggaatcttaagaatcccgggctcccagcgcaaattacggtcaacaacgttttccagaatcagacagggactgattttctcggcaacccgccctttcagatgccatatctcggatctagcactacgggatctgccaatacaccctcatatcccgatcctttcaccgattcggcgtatctcaactgggctaacgcactcatgaacgctcagacagcggatatgtgggacggggcgtcaacgtggcccacgagcgggcagggtcagaggcagtgtccctcggacacgatcatgcctgattacgttccttcgcaaacggcagaaccaatgcacatctcggggcccagcttggaggatgagccgatgagcctaaaagttcccacaaacacgcccaccggtgaggcggacgaggggcaggaccctccgcttcaaatgaaacagcccaccgtcctaccatccgacttcgcgtcttccctcacgcggtcgctcttgaaccaaccatttccgcttcccgtccatcactgcaatcctggcctttcggcgacggactcgaaaccaaacaaagacaggcagcaggcgtcactcggtcgaagcaacgctagggagaccacagcttccgcctcaaattcgtcgtcgtcctcgtgtggtgaattcggctgcataggaacgagcattggaagcgatcatagcggcacctcgctgcccagcctgagtagttctggcccaacagagccgagctcgtccagcggccagagcagcagcggcgccctcggcagtagcaagacagtcaataacgggaccggcagcaccgcccctaaacgttcgcgaaattttacacccgcttctgtcaaggctattgacgaggaagaagaaccacgtcgggcaagcccgcacgccaggcctccgggatacggcgtgatagacatcctcggcgacatcggccaatga

SEQ ID NO: 4753 - protein, 551 aa, Myceliophthora thermophilia
MRYDDWDVILFPAGRDSKIPFKEFRVACHVVPDLELAHIHGAVGIPVMTCFVPSLAPGTAFQISIHCWRKPNLSQFTRAYSKHTELIKFEARILIDGRLVASTVLDREVNGPHLITSTCEFTKTGELERLRFPHFRRELLYQNHWRPGDDIGRIKLVISEGFPRDSLSAPIERVKNVVAFSFQHAPLEILESNAIAWPNQSMWQCSGLNPVMPVPTYQLEDGPSSHAHSPGRNSLPLRNLKNPGLPAQITVNNVFQNQTGTDFLGNPPFQMPYLGSSTTGSANTPSYPDPFTDSAYLNWANALMNAQTADMWDGASTWPTSGQGQRQCPSDTIMPDYVPSQTAEPMHISGPSLEDEPMSLKVPTNTPTGEADEGQDPPLQMKQPTVLPSDFASSLTRSLLNQPFPLPVHHCNPGLSATDSKPNKDRQQASLGRSNARETTASASNSSSSSCGEFGCIGTSIGSDHSGTSLPSLSSSGPTEPSSSSGQSSSGALGSSKTVNNGTGSTAPKRSRNFTPASVKAIDEEEEPRRASPHARPPGYGVIDILGDIGQ

SEQ ID NO: 4754 - DNA, 249 bp, Myceliophthora thermophilia
atgggaaagagtaagatggatgatgccgctgcccagcggatttgccgggctcgcggcgaaaaggacggcttctccaagcgtgcggcggaggcggctcggaggaatgggcagaatagtcacaccggtccgcgtgacttgtctttctcctcctcctcctcctcctccataggcggcggcagcagcagcagcagtagtagcagtggaggcgagggtaagattggtcagaagggtggctggggcaagaagtga

SEQ ID NO: 4755 - protein, 82 aa, Myceliophthora thermophilia
MGKSKMDDAAAQRICRARGEKDGFSKRAAEAARRNGQNSHTGPRDLSFSSSSSSSIGGGSSSSSSSSGGEGKIGQKGGWGKK

SEQ ID NO: 4756 - DNA, 330 bp, Myceliophthora thermophilia
atgggtgcaggcctgtcactgaaaatagaattaatatccgggctgcggtggcgcatgcatcgagacgtcggcgccgcctccgctctcgtcgacgtcgacgacgcccccggggacgccatgcatcgtggatcgccaccccgacccgcggtgcggcccgcgatcgacctgctacccgagcatcccgtgctacccggccatcccgtgcttggggacttgtatcaccaggacatggagccacaaaccgaccagcaccagaacgtgtcgtggaccccactgctgggacacagattgaacttgggatggttgagtgtagtgaggaataggttttga

SEQ ID NO: 4757 - protein, 109 aa, Myceliophthora thermophilia
MGAGLSLKIELISGLRWRMHRDVGAASALVDVDDAPGDAMHRGSPPRPAVRPAIDLLPEHPVLPGHPVLGDLYHQDMEPQTDQHQNVSWTPLLGHRLNLGWLSVVRNRF

SEQ ID NO: 4758 - DNA, 297 bp, Myceliophthora thermophilia
atggaggacaatgaccttctaaacaagctcgggcatggcatcgctattggcttctctcctacgatgatggacccggattcggtcgtcgacaccaaatggcgcaaccaagcgctgacagacatattagggccgggccataaggtactgtggccaggacctgtcatcttcttctcgtacggatatgacgtgagcgactatgttaaagtcggtccgaaccagccagacgtcgcagtgagcggggccgaggcgggcatgacccaacacgagatctggagagagctggacatgttgcgctag

SEQ ID NO: 4759 - protein, 98 aa, Myceliophthora thermophilia
MEDNDLLNKLGHGIAIGFSPTMMDPDSVVDTKWRNQALTDILGPGHKVLWPGPVIFFSYGYDVSDYVKVGPNQPDVAVSGAEAGMTQHEIWRELDMLR

SEQ ID NO: 4760 - DNA, 1710 bp, Myceliophthora thermophilia
atgcctaataaattccaggacctccatactgttgatgatgtcagttatccctacgtctttgagcagaatgctacggtcaacctcaagtccggcggtgtagtccgctgcaatatatatcggcccatgaagggcggtcctgtcccggttttggtcacctacggtcccttcagctcgaaatactccgaagtgaatcctcgtcataagtccgcccattccgcctgggagacgcccgatcccggcttctggaccgagcatggcctcgccgtggtacgcgcggacgaggtgggcctgggccagtctcccgggatgcttgacactatgtcgcgggcgactacggacgcattcgttgacgttgtcgagtgggccgctgagcagccgtggtcttcaggcaagattggcctcttgggcgttagctactacgctggaagccaatggcgcgtagctgcccggaaacctaagggactcgcggcaatcatcccgtgggagggaatgtctgactactatcgagatcggtgccgccacggcggaatcctgtccaacggctttatcaaattctgggttgacataaaagcagatacgattgaaggggacctctcagaagaagagctcgccgccaatcgccgagatcagactatcgacaaccggaagcaccgattccgcgacgaaccatactacgcgtccaaggagtacgacatgggtgacatcgaagtgcccctactctctgtgggcaactggggtggcatcctgctccacctccggggcaacgtcgagggctttgtccacgccagctccgagttcaagtacctccgcatgatcaccggccgacacgacctccctttctactatgacgaagaggtcgaggtgcagcgcagctttctcgacgccttcctcagggccgaggaccgtgtcggctggtcgcagcccggcacggtccgccccgtgagtctggtcctccgcaaaggcaacgtcggcttcaacaaccccgaagcagagaaggcctaccagcgccgcgaggagaacgaatggcccatcgcgcgcacccggtacacccgctaccacctcaccccggatctcaccatgcacgccgacccggccggcaccatgcccaagaggaacaagctgacctaccacgcgctgggcacgatcgaaaacccgcactttctccagtttgtgacacctccgttcgagcgcgagacggagatcacgggccacgtcgtggcgcatctcaacgtgtcggcctcgcccgacccgtcctgccccaccgttccctcggacatcgacctgttcctgacgctgcgccacctcggcgcggacggtaacgagatcttgtacacaggcacggcgggcgaccccgtgccgctgaccaagggctggctgcggacgtcgctgcggcgggtcaacgcggcgcaccccaggcaccgcgactggctcccccaccgggactacaccagccgcgacgtgctgagcgtcatacccggcgaggtctacgcggtggacgtggaggtgtggccgacgaacgttgtcgtcgagggcggaggccggttggtgctggaggtcagctccggggacacgcaggggagcggcatcttcttgcacgatgatcccgtggatcggtcacccgaggtattccaggggtttaaccacatccatttcgggccgcagtttgagaattatgtcaccctcccgatcatacctcccagggaagattga

SEQ ID NO: 4761 - protein, 569 aa, Myceliophthora thermophilia
MPNKFQDLHTVDDVSYPYVFEQNATVNLKSGGVVRCNIYRPMKGGPVPVLVTYGPFSSKYSEVNPRHKSAHSAWETPDPGFWTEHGLAVVRADEVGLGQSPGMLDTMSRATTDAFVDVVEWAAEQPWSSGKIGLLGVSYYAGSQWRVAARKPKGLAAIIPWEGMSDYYRDRCRHGGILSNGFIKFWVDIKADTIEGDLSEEELAANRRDQTIDNRKHRFRDEPYYASKEYDMGDIEVPLLSVGNWGGILLHLRGNVEGFVHASSEFKYLRMITGRHDLPFYYDEEVEVQRSFLDAFLRAEDRVGWSQPGTVRPVSLVLRKGNVGFNNPEAEKAYQRREENEWPIARTRYTRYHLTPDLTMHADPAGTMPKRNKLTYHALGTIENPHFLQFVTPPFERETEITGHVVAHLNVSASPDPSCPTVPSDIDLFLTLRHLGADGNEILYTGTAGDPVPLTKGWLRTSLRRVNAAHPRHRDWLPHRDYTSRDVLSVIPGEVYAVDVEVWPTNVVVEGGGRLVLEVSSGDTQGSGIFLHDDPVDRSPEVFQGFNHIHFGPQFENYVTLPIIPPRED

SEQ ID NO: 4762 - DNA, 366 bp, Myceliophthora thermophilia
atgagctccaaaggacgagtgaatacatgcactgccgaataccaatcacagcagcgagggccagcgttgggcggatgtgcagaactaggcgcgcatggtgagattgccgaagctgccatcgtcattgctgactggggcaagcaagcgataattaacgcgacggctgccagtacggatacaaaccccaacaatcttggttacgtccgtgcttgggcgttccgcttaccctgcaaatccaggccccgggcctactccacttgcgttcgattccgaggcttgatatggcgaaatggtcatgagagggaaggaagcaaagtgcaggaaacaaactgcaaaccccctctgccacagttcagtcaacactga

SEQ ID NO: 4763 - protein, 121 aa, Myceliophthora thermophilia
MSSKGRVNTCTAEYQSQQRGPALGGCAELGAHGEIAEAAIVIADWGKQAIINATAASTDTNPNNLGYVRAWAFRLPCKSRPRAYSTCVRFRGLIWRNGHEREGSKVQETNCKPPLPQFSQH

SEQ ID NO: 4764 - DNA, 291 bp, Myceliophthora thermophilia
atggaccgggatagtcgcttgccgtcctcggcgggggaggttgaggacgaacctgggcacggaatccccgagatcgagtgtggacatcagccgcagatgaacagttcgtcagaacgcggcgtactcgcacgctacctcaaaagttggcagagcacatgcccatctcagaggtttgaatggcagttcctagtgcccgcgcggcacggtccgcggatggcgggacgatctagtccgccgacgcttaacccgttcttccacttggctgatcggggcggatatacggacgtataa

SEQ ID NO: 4765 - protein, 96 aa, Myceliophthora thermophilia
MDRDSRLPSSAGEVEDEPGHGIPEIECGHQPQMNSSSERGVLARYLKSWQSTCPSQRFEWQFLVPARHGPRMAGRSSPPTLNPFFHLADRGGYTDV

SEQ ID NO: 4766 - DNA, 396 bp, Myceliophthora thermophilia
atgacctgcaagctcacccatcgagtcatgacacagccgaatgaccccccagtcatcaagggcgcaccctcctttgtcggactcggtgtgttctcgactgacgaatacgttcccaacggcgggactggacctgacggaaacgccaaggaatggtatgccaacttctatcggcagatccgaaacttcaagttcgacatcacccagaccgacccaaatgcctacatttgtgcgattcattaccaggtagcccaggcgacagagagcagacaaggcatccagcctggcaaaacgggtgtcggagcgcgggcgacattggccggcgagctacaggataaagggggcagggcaaaagcaaacgagatgaggaggcagcgaccgagcgaaggggatgagtga

SEQ ID NO: 4767 - protein, 131 aa, Myceliophthora thermophilia
MTCKLTHRVMTQPNDPPVIKGAPSFVGLGVFSTDEYVPNGGTGPDGNAKEWYANFYRQIRNFKFDITQTDPNAYICAIHYQVAQATESRQGIQPGKTGVGARATLAGELQDKGGRAKANEMRRQRPSEGDE

SEQ ID NO: 4768 - DNA, 1143 bp, Myceliophthora thermophilia
aataatattgcgccaaacaagtggttgaacagcacactaactctacccagcgattacagcagctttgctcaacccagcatgcttgcctccaatgcttctgggatgttttccttttgtcaaacaggaccagcggacctggcaggttcgtcctgggatgcgacagttgaaggatcacagaacttccctgagcttgcagatgccgcggactattattctggagaaaccgaggactttgttcttccctttggccagaacacccccaagccggaccacctggatgccgcggatgagtttcagaccaaatggactcctgccgtctcactcgagagcaaggctctgaaggcagagcccatgaggagagggacttcacgcagctccacggggagccacaagaataggagcaccaaggtctccacccagtcagccaagaagagccggtcaagagttcagagcgttctgtctcaggcttcttcgcagatgtccaagcttgacatgtcaagtaacgcgtcgactcacgcccagggccgcattatggatgttcagcaataccttgcgcaggatctggatactctgtctgtctcgcctcaggtaactaacgctgcgttttactcgggtcttggggtcttcgcggatggactgccctattctggcgacattggcgctactatggcccagcatgtgaatccacaaatcttcgatgctggtctcatcgccgcctcgccacactcctggggctcgctgagccctgttgactcgcggatgtcttcccccggaattcaggatggatcagatgatgtttggtctgcggctccatccgcttcttctccaggagagagccaaaactcaaactcgccggcgctgccaggccagtcacccaggatgagccgcaaactggacgcttcacagtatgttagctccgatgaggtgcaaggccagatgatgcccgccatgggagaggatggctttgcccttcctcacgctgcctttggctctcgccgtgccagcggcgaaggtgagtctgcacgggaccattacctgtacaagaatgcgttcccccaagcggacggccttttccactgcccatgggagggccaggctagctgcaaccacaagcccgagaagctcaagtgcaactacgagtaa

SEQ ID NO: 4769 - protein, 380 aa, Myceliophthora thermophilia
NNIAPNKWLNSTLTLPSDYSSFAQPSMLASNASGMFSFCQTGPADLAGSSWDATVEGSQNFPELADAADYYSGETEDFVLPFGQNTPKPDHLDAADEFQTKWTPAVSLESKALKAEPMRRGTSRSSTGSHKNRSTKVSTQSAKKSRSRVQSVLSQASSQMSKLDMSSNASTHAQGRIMDVQQYLAQDLDTLSVSPQVTNAAFYSGLGVFADGLPYSGDIGATMAQHVNPQIFDAGLIAASPHSWGSLSPVDSRMSSPGIQDGSDDVWSAAPSASSPGESQNSNSPALPGQSPRMSRKLDASQYVSSDEVQGQMMPAMGEDGFALPHAAFGSRRASGEGESARDHYLYKNAFPQADGLFHCPWEGQASCNHKPEKLKCNYE

SEQ ID NO: 4770 - DNA, 1848 bp, Myceliophthora thermophilia
atggggtccaatctcattcaccacccggacggctgggtcgggacaacgccgtggtggaaagacgcggtcttctaccaggtgtacccggccagcttcaaggactccaacggcgacggctggggcgacataccgggactcatctccaagatcgactacctccatcggctgggggtggacgtggtctggctgtcacccatgttcgagagcccgcaacaggacatggggtacgacatctcggactaccaggccgtccatcagcggtacgggacgctggaggatgtcgaccggctgatcgaggcctgccacagccgcggcatgaagctgattctcgacctggtggtcaaccacacgtcggaccagcacccctggttcaaggagtcgcggtcgtccaagaccagcccgaagcgtgactggtacatctggaagccgccgcggtacgacggcgagggcaaccggatcccgccgaccaactggcgcggctactttgccggcccgacctggacgtgggacgaggggacgcaggagtactacctgaacctgtacgggcccttccagccggacctgaactgggagaacccggagtgccgggcggccgtgtacgacgaggccatgcgcttctggctggaccggggcgtggacgggttccggatcgacacggtcaacaagtactcgaagcggactgacttcccggacgcgcccgtgacctgccccggggtggcgcaccagccggcgcccgagatgtggtgcaacggcccgcgcatccacgagttcatccgcgagatgcggacgcgggtgctggcgccgtacggggccgtctcggtgggcgagctgtccaacacgccgcggccggagcaggtgctgccgtacgtgtcggcggcggcgggcgagctcgacatggcgttcgagttcagcacgatccggctcggcaccggcgacctgttccacggcaagtacatctaccggcccttccccctgtcggcgctcaagcggctggtcgagacgtggcagaccttcaccgaggggacggacggctggcacaccgtcttctgcgagaaccacgacaacggccgggccgtgtcccggttcggcgacgacagcacgccggagctgtgggaggccagcgccaagacgatcgcgctgtggcaggccacgtcgacggggaccctgttcctctaccaggggcaggagatcgggatgcggaacatgccggcgagctggggcatcgaggagtacaaggacgtcgagagcgtcggcttctacaacgaggccgtcgccacgggggaccaggaccgcgtccgggccacgctgcacggcctgggcatcctggcccgggaccactcgcgcatcccgttccagtgggacgactcgccgaacgccggcttcaccgacgagggcgtcacgccctggatgcgcgtgcacgaccagtaccgcgagctgaacgcggccaagcaggcggccgacccggaatccgtcctggggttctacaccaggatcctgaagctccgcaaacaataccgcgacctgttcacgcacgggagattcaggctcctcgcccccgacgacgaggccctcttcatgtacgtcaaggaaggcggcgcggacggggacggggacggggacgacgacaagaagaggaggaaggcgctggtggtcatgaacttcagcagctccgtccagcaatgtcccgacatcagcggcgctctgggttgccgcgagggagaggcgagcctgctgctgagcaccgtccggtccgggaagtcggcggcttccgacgggctcgggcccggcctccgaggcagcgagctgagcccttgggaaggaagggtgtatctgaactttaagccgtga

SEQ ID NO: 4771 - protein, 615 aa, Myceliophthora thermophilia
MGSNLIHHPDGWVGTTPWWKDAVFYQVYPASFKDSNGDGWGDIPGLISKIDYLHRLGVDVVWLSPMFESPQQDMGYDISDYQAVHQRYGTLEDVDRLIEACHSRGMKLILDLVVNHTSDQHPWFKESRSSKTSPKRDWYIWKPPRYDGEGNRIPPTNWRGYFAGPTWTWDEGTQEYYLNLYGPFQPDLNWENPECRAAVYDEAMRFWLDRGVDGFRIDTVNKYSKRTDFPDAPVTCPGVAHQPAPEMWCNGPRIHEFIREMRTRVLAPYGAVSVGELSNTPRPEQVLPYVSAAAGELDMAFEFSTIRLGTGDLFHGKYIYRPFPLSALKRLVETWQTFTEGTDGWHTVFCENHDNGRAVSRFGDDSTPELWEASAKTIALWQATSTGTLFLYQGQEIGMRNMPASWGIEEYKDVESVGFYNEAVATGDQDRVRATLHGLGILARDHSRIPFQWDDSPNAGFTDEGVTPWMRVHDQYRELNAAKQAADPESVLGFYTRILKLRKQYRDLFTHGRFRLLAPDDEALFMYVKEGGADGDGDGDDDKKRRKALVVMNFSSSVQQCPDISGALGCREGEASLLLSTVRSGKSAASDGLGPGLRGSELSPWEGRVYLNFKP

SEQ ID NO: 4772 - DNA, 1797 bp, Myceliophthora thermophilia
atgaccgtaaacacccgcgaaaagcagtggtggaagcaggcggttgtctaccagatctacccagcatccttttgcgactccaacggcgatggcatcggcgatcttcctggtatcacatctaagctcgactacatagctagccttggcgtcgatgtcatttggatctgccccatgtacgacagcccgcaggtggatatgggctacgacatctccaactatgaagacgtttaccggccgtacggcaccgtccaggatatggagacgctgatcaaggagacgcatgcccggggcatgcgcatcatgctcgacctcgtcatcaaccacacctctgaccagcacgcttggttcaaggagtcccgctctagcaaggatagcccgaagcgcgattggtatatctggcggcctgcgaaatattccccgtctggcgagcggctgccgccaaacaattggcggtgcaactttggaggcggcagtgcctgggagtgggacgaactcacgcaggagtactacttgcatctcttcgcgaccgagcagcccgatctcaactgggagaatcccgaaacccgcaaggccatctacgcctcggctatggagttctggctcgagcgcggggttgatggcttccgcatcgacacggtcaacatgtatagcaaaccgcctaccctcccagacgcccccattgtcgatcctggcacgccctaccagcccgccggcatgatctattgcaatgggccccgtatgcacgagttcctcagcgagatgaacgccatacttaccaagtacggtgccattacggtcggagagctgccctgcacccccgacacgtctcgcgtgctccagtacgtcagcgcaaaggccaagcagctcaacatggtgttccagttcgacgtggtcgacgtcggcatggggaagacgcacaagttcgcgacaccgcccaggaacttcactctccccgacttcaaggcggcagtcgacatgacacaggcgctgatccgcggcaccgacggctggtccaccgtgtttatcgagaaccacgatcaggcgaggtcagtcagccgctttaccgacgaccggcccgagttccgcgttcggggcgccaagctgctggctctcatgcaggcttgcttgagcggcacacagtacatctaccagggccaagagattggcctcgtcaaccttcccaaggacgcgtaccccatcgagaactataaggacatcgacagtacactgttttacgacatggtcaaggagcgctatggcgccgacaacaaggtcgagctggacaaggcgtttgacgccgtgcaatacctggccagagaccatgctagggtccccataccttggaatggccaggccaagtacggtggattctccgaggccgccgaaaaggctggcaagaaagttgaggagccgtggatgaagacgcacccgctagccagcgagatcaacgtggcctcgcagctcaacgatccagacagtgtgctcgcattctggcgcaagatgctccgcttccgccaagcgtacgcccatctacttgtgtacggcgacttcaaggacctgagacccgacgacaagaatctatttatgtatctcaaggagccagaccatggcgctggcgacagggtgcttgtggttctgaacttcaccacggaggaccagacctggaatgtacccagcccggcagagcttggcgcgtcagaaaacccagagctaatacccatcatggccacgcactcggggatgcggaaacttggtcagctcgagccgtttgagggccaagtgtatcttgtcagatag

SEQ ID NO: 4773 - protein, 598 aa, Myceliophthora thermophilia
MTVNTREKQWWKQAVVYQIYPASFCDSNGDGIGDLPGITSKLDYIASLGVDVIWICPMYDSPQVDMGYDISNYEDVYRPYGTVQDMETLIKETHARGMRIMLDLVINHTSDQHAWFKESRSSKDSPKRDWYIWRPAKYSPSGERLPPNNWRCNFGGGSAWEWDELTQEYYLHLFATEQPDLNWENPETRKAIYASAMEFWLERGVDGFRIDTVNMYSKPPTLPDAPIVDPGTPYQPAGMIYCNGPRMHEFLSEMNAILTKYGAITVGELPCTPDTSRVLQYVSAKAKQLNMVFQFDVVDVGMGKTHKFATPPRNFTLPDFKAAVDMTQALIRGTDGWSTVFIENHDQARSVSRFTDDRPEFRVRGAKLLALMQACLSGTQYIYQGQEIGLVNLPKDAYPIENYKDIDSTLFYDMVKERYGADNKVELDKAFDAVQYLARDHARVPIPWNGQAKYGGFSEAAEKAGKKVEEPWMKTHPLASEINVASQLNDPDSVLAFWRKMLRFRQAYAHLLVYGDFKDLRPDDKNLFMYLKEPDHGAGDRVLVVLNFTTEDQTWNVPSPAELGASENPELIPIMATHSGMRKLGQLEPFEGQVYLVR

SEQ ID NO: 4774 - DNA, 2559 bp, Myceliophthora thermophilia
atggccgagggcctgctctacaaccccttcgactggaccctggccttcgatcacgcgctcaaggagattgtcaagacaataccccaggcacgacccgaccaggtggaccccgacgtcctgtactactgcgcctgggccggcagctttggcctcaatgcctgcaatccgcggacgctgtcttcgcagcacctcaacagcatggtctcgattgagggcatcgtcacgcgctgctcgctgatccggcccaagattgtcaagagcgtacactatgccgaggctacccagaagtggcacttcaaggagtaccgcgaccagaccatgaccaagggcgtgaccacgaccagcgtgtaccccaccgaggacccagaaggcaaccccctaatgaccgagtacggcttgtgcacgtaccgggaccaccagaccatctcgatccaggagatgcccgagcgggcgcctgccggccagctgccccgaggtgtcgacgtgatcctcgacgacgacctcgtcgaccgggtcaagcccggcgaccgtgtccagctggtgggcatctaccggaccctgggtaacaggaatacgaaccacaacagcgccgtcttcaagacggttctcctggccaacaacgtcgtgctgctctctaccaagtcgggcggcggcgtcgcgacggccaccatcaccgataccgacatcaggaatatcaacaagatcgccaagaagcccaagctgttcgacctgctgtcccagtcccttgcccccagcatctatgggcacgagtacatcaagaaggccatcctcctgatgctcctcggaggcatggagaagaacctggagaacggcacccatctgaggggcgacatcaatatcctcatggtcggcgacccctcgaccgccaagtcccagctgcttcgcttcgtcctcaacaccgccccgctggccatcgcaaccaccggtcgcggctcttcgggcgtcggtctcaccgcggccgtgactaccgacaaggagacgggcgagcggcggctcgaggccggcgccatggtcatggctgaccgtggcgtcgtgtgcatcgacgagttcgacaagatgtcggatattgaccgggtggccatccacgaagtcatggagcagcagacggtcaccatcgccaaggccggcattcacacctctctgaacgctcgctgcagcgtcatcgcggcagccaaccccatcttcggccagtacgacacccacaaggacccgcacaagaacatcgccctccccgactccctgctgtcccgtttcgaccttctcttcgtcgtcacggacgacatcgaggacacaagggaccggcaggtctcggaacacgtcctgcgcatgcacaggtaccggcaaccaggcacggaagagggcgagccggtacgggagaactcgggccaggcgctgaatgtggcgctcaacaaccaagccgattcgcagcggccgacagaggtgtacgagaagtacgacgcgatgctgcacgcgggtgtcaaggggacaggacggggtgccaacaagaagcccgaggtcctgagcatccccttcatgaagaagtacatccaatacgcaaagacgcgcatcaagccggtcctgacgcaggaggcggccgaccgcatcgccgacatctacgtcggcctccgcaacgacgacatggagagcaaccagcgcaagaccagcccgatgacggtgcgtacgctcgagaccctcatccgtctcgccaccgcgcacgccaagtcccggctgtcgaaccgcgtcgaggagcaagacgccgccgcggccgagtccatcctccgcttcgcgctcttcaaggaagtcgttgaagacgaatcccgcaggaaacggcgtaagacacgccctctcgaagacgaagacgactccagctcctcctccgacgacggcaattccgactcggacggcgacgaaccgaacggcaccgcccgtggcagcaccgcgcgctccacacgtacctcccaacgccccgacaacaacaacaccaacggccgtcgccgcccagccggccgtaggagacagggcgcctcgtccgacgacgcggacggcgccacgcccgcggaaaacgacgaggacgagaccgaagacctgtacaacgccaccccgcgccgctcgacgcgcaccacccgcacgtccgccgccgccgccgcctcttcctcctcccaaccttcctttgcctcctccatcccggcctctcagctccgcagccagtcccagcgcgacgacggcgccgacgccgacgaatccctcgcctcgggtaccgccaacctgaccgtctccgacgccaatggcggcggcgacgaggacgaggacgaggacgaagaagaccaggacgagcggatcagcgaggcccgcctcgaggtgttccgccgcgcgctgggccagctcctcaacacgagcctgttcgaggaggacgactcggcgggcgtcgacgagctcatcgaggctgtcaacgcaaaggtcggccggcagcagcggtttacgcgagaggaggcggtcaaggcgctgagggagatggatgccaggaatcagatcatgtga

SEQ ID NO: 4775 - protein, 852 aa, Myceliophthora thermophilia
MAEGLLYNPFDWTLAFDHALKEIVKTIPQARPDQVDPDVLYYCAWAGSFGLNACNPRTLSSQHLNSMVSIEGIVTRCSLIRPKIVKSVHYAEATQKWHFKEYRDQTMTKGVTTTSVYPTEDPEGNPLMTEYGLCTYRDHQTISIQEMPERAPAGQLPRGVDVILDDDLVDRVKPGDRVQLVGIYRTLGNRNTNHNSAVFKTVLLANNVVLLSTKSGGGVATATITDTDIRNINKIAKKPKLFDLLSQSLAPSIYGHEYIKKAILLMLLGGMEKNLENGTHLRGDINILMVGDPSTAKSQLLRFVLNTAPLAIATTGRGSSGVGLTAAVTTDKETGERRLEAGAMVMADRGVVCIDEFDKMSDIDRVAIHEVMEQQTVTIAKAGIHTSLNARCSVIAAANPIFGQYDTHKDPHKNIALPDSLLSRFDLLFVVTDDIEDTRDRQVSEHVLRMHRYRQPGTEEGEPVRENSGQALNVALNNQADSQRPTEVYEKYDAMLHAGVKGTGRGANKKPEVLSIPFMKKYIQYAKTRIKPVLTQEAADRIADIYVGLRNDDMESNQRKTSPMTVRTLETLIRLATAHAKSRLSNRVEEQDAAAAESILRFALFKEVVEDESRRKRRKTRPLEDEDDSSSSSDDGNSDSDGDEPNGTARGSTARSTRTSQRPDNNNTNGRRRPAGRRRQGASSDDADGATPAENDEDETEDLYNATPRRSTRTTRTSAAAAASSSSQPSFASSIPASQLRSQSQRDDGADADESLASGTANLTVSDANGGGDEDEDEDEEDQDERISEARLEVFRRALGQLLNTSLFEEDDSAGVDELIEAVNAKVGRQQRFTREEAVKALREMDARNQIM

SEQ ID NO: 4776 - DNA, 2280 bp, Myceliophthora thermophilia
atggcattattggtcgagtggcagcgacgacttgaaacctcgtgcccgcttccagcggctgtcctcggctccaacacccgtccagccagccccgctcccaagattgtggtcgagtcccggcccgttggcaatgggtggcccgtgacagtgtccgtcgggttgccctcatccagctgctctcggctcacaaccgcgctccatgtcacgggaggcactggtgacgggaccggcctgcagctccccgacaacttctccatcgtgcggacgccgctggatgtcgtgtcactggccggagctacaggctcactaggagggggttcacattgcagcatcttgtccaacccaagacgcccagaagccgtggcccagccccctccgtccgccatccccaagcgccgtcacattcgacgtcctcgttcagccaacggcttcacctgcggacgaagctttacctgtcctcccacgtaccaggagaaagaagactaccggtcgctcgtcatccatcaccaccactgccttgcccgtcgcgtcggccccgcccgcgccggccggaagacgttcggaacatccgggcccatcaccggccctagcgccatatcctccatgcggccattcggccaccgaggcgacgattgttggacgtcttttgcccatcgccgaggaatagcgaacactccacgtctcggcctcgatctcgcacagaccaaagccggccccggagctgctgctgattcaccacacagctatccctctccgcccatgtcggggtctccgccgctacccccgaagaacagccgcgaggttgccgaacagggccaggggacgtatcaggcgactatacataatgtgtatccgaccgcttcgactgcaggaaacgaggagagggcgcaggtagcagccgccgatggctcccgtgtatacctctcaaatccgccggatcgagcatcgtacgctctcccccctatcgaggtaccgggggcagggtcattgctctactcgcatccgcccagccagggcggcgccccccagccgccagtctacttgcctgcccccggaaccggaacgacctcgaatcatcccggatctctcctctctccacaaaccaccaacaaggaggcggcatgtgtcgatgtgcaacacaagaagcgcggacggccccgtctacgggatgacggccaagcgagatatgagggttccggattcggaagtgccgcggacgccatgaggaggccgctagtgtacgacccggggccacggctggccgaaccaattgcaccgaggttcctggagcgcgggttggcatccgatgcgaacgtgtaccctgccccgctgtcgaacgccctagccagagcacccgaagagccggttgcgtacctgacaatcggcctcgaattctcaagggtatccccatccttcctgagtgcgatcggccggtcttcagtcacgggagtcgacttcgcgaatgtgctggtagccgaagaccgtccgagagcttccagactccggcagcaggcgcaggaagagcaaaccagcaaggatccagcttacttgccgccgatattcaacgagcggagcgaggcggtgatgcaaagccttagctttaccccggaagaagtgtcgagatacccgctccactggctggatacttttactttcctcggcgacgacgggcatgcgcgaccgatctcgccatcgtacccgacgccctcacccagcagcctcagagatttgggcggctcctttgaccccggcctgcaaccgtactcccagtccacaccgccctcggcgacgttcgactcgcgtcagtcgaggctgagcgatgctgggcaccacgatcccaggcagaccgcacagctgactggcgggtcgtcgctgcacatgttgccagcccgacgcccaagcctcctctcatcaccgtatggcctctcaccgggacgggccgactacccaatcacccctagcgcataccaggtcccgagaaccgaggcgcacccgtctggtcgcccatctcaactcacagattatcagctacctcttcccaggataaggagcccacctttaggcacctcacaacaacgcgacgtgcctcagactcagcaatcgctgccgccgccaccagcaccaccaccacctcctcctcctcatcctcctccgcctccggctgctgctgctgctgctgccgctgttgtaccgccataccaagcccgagaggaacggacccgaatagaaatcggaggtctgattgaacagccggaaacgagggagagtccacagcggtag

SEQ ID NO: 4777 - protein, 759 aa, Myceliophthora thermophilia
MALLVEWQRRLETSCPLPAAVLGSNTRPASPAPKIVVESRPVGNGWPVTVSVGLPSSSCSRLTTALHVTGGTGDGTGLQLPDNFSIVRTPLDVVSLAGATGSLGGGSHCSILSNPRRPEAVAQPPPSAIPKRRHIRRPRSANGFTCGRSFTCPPTYQEKEDYRSLVIHHHHCLARRVGPARAGRKTFGTSGPITGPSAISSMRPFGHRGDDCWTSFAHRRGIANTPRLGLDLAQTKAGPGAAADSPHSYPSPPMSGSPPLPPKNSREVAEQGQGTYQATIHNVYPTASTAGNEERAQVAAADGSRVYLSNPPDRASYALPPIEVPGAGSLLYSHPPSQGGAPQPPVYLPAPGTGTTSNHPGSLLSPQTTNKEAACVDVQHKKRGRPRLRDDGQARYEGSGFGSAADAMRRPLVYDPGPRLAEPIAPRFLERGLASDANVYPAPLSNALARAPEEPVAYLTIGLEFSRVSPSFLSAIGRSSVTGVDFANVLVAEDRPRASRLRQQAQEEQTSKDPAYLPPIFNERSEAVMQSLSFTPEEVSRYPLHWLDTFTFLGDDGHARPISPSYPTPSPSSLRDLGGSFDPGLQPYSQSTPPSATFDSRQSRLSDAGHHDPRQTAQLTGGSSLHMLPARRPSLLSSPYGLSPGRADYPITPSAYQVPRTEAHPSGRPSQLTDYQLPLPRIRSPPLGTSQQRDVPQTQQSLPPPPAPPPPPPPHPPPPPAAAAAAAAVVPPYQAREERTRIEIGGLIEQPETRESPQR

SEQ ID NO: 4778 - DNA, 4905 bp, Myceliophthora thermophilia
atgccgttatcttttgtgcgcctctccgatgcccccaagaaggcgaaaccgatcaggtcggcctatgaaagcgagagttttgatgccgatggcgcaatccacgtcgacgggctggtcgggtcagcgactatctccccctcaggacgagatgttgccttagcatcccccgaaggtcttgccatcattgacttggattcgccttggagccctcctcggaggttgagcagccatggcctcccatggctcgttgttgacgtacagtggtcgccatttgcggcacgcgattattgggtggcctctacggcaaaccatcgctgtttagtatggaacctcaacaaacgggacgactcgtcgtcaggtgccattgagcattccctccaggctcacagcagagccattaccgatgtcaatttctccgctcaccacccagatttccttgcgacctgcgcagtggatggctatgtttactgctgggaccttcggcggccgagacagcctgtgctctccttttgcgactggtttgctggcgccacccaagtcaagtacaaccgccaggacccgaatgtcctcgcctctgcccatgaccgccggcttcacatatgggatgtcaggcggtcggttgagcctctcaagacgatcgatgctcacacgtctaaaatttatggtgtcgattggaaccgcataaattccacttgcctcgttacgtgctcccttgataagagcatcaaattctgggactatggcaaagatggcgaggaaccgcagagagttattcgcactgatttcccggtatggcgagctcgccacacgcctttcgggtacggcctattagctatgcctcaaacagagccaggcaacttgttcctcttcgaccaacgccccgatcccgaaaccccagtggatggggcagtcaagcctgtcgctgttttcccaggacacggaaatcacaaggccaaggaatttctctggagaagtcgcggcggcgtgaccaacgaaggtatagataaccgcgattttcaactggtttcctggggcgaagacaacgagctacgccttcacaaggtcgagcatgagcttctggaatccgtgggtcactttaaaggtcgtcccctgatgaagaacctcatcctcacccgcaagggtgcaccatacaaaactttccgcaccgtcgatgatgttcaccgcgatcgcagaagcccgaccatgaccgaccgccctggtagtggcgggcagcttcgccaaagtgcgctgagcagcggcttgaatgcgggcctccgtcgtgttggaccctcttggaggtccacgtccatgaaggcgaggacgaacacaagcaagcatgttgataaaacccagctccagatcggatggatgaaggggattaccatgtcaaagaggaaatctagctcggacgcgcctggccgtgctggtccggaggactcgggtatcttcggtcccggctacgacagtggttggggggagccagaaaccattcaggacgagttcctccgtatcagcaaccagcttcccaatgtcaagtgggagaacattgacatggatgctctcaccttgaatgcgtccctcaaggggccgtggggtgtcaacggcgaaacgatcttcatcaaggtcaaggtggatattcccaagagctacccgaagagcaaggcaccgcggttctatgtcgagaagtcatcattcatgccagaagagacgcatcggaagctcgagcatgaactacgtgaacttgggaaccgattcttgcagcgaaagcaaaactgtctcgacaccgcgtttgaatatctgcttggcgaggtcgacctcgaaacgagtaccgcgtttttcaacaatgtccgagactttgatgacgacgacgcattggcagatgagagctctagcgaggaagatgaaaatgatatcccagctggtggttcggcatccatgtcccaggagctcagcaccagcaccgaactggacccctcgggaaccttggcctctgcccagcgccaggctgtcacgcctctgcccatgttttgcggagctcgattctccaatgatggcaggttggtctgcttcttcccgacaaaggaggagaaggccaaagctctattcgctcttccgcacccagattcgtccaaggagcggtcgaaaggagagcccacctttgccggcttcggtcgcctttctcacgactctccgcctcctaaacatcggttccatgacgagacatctgcgacggatgaccagtcggaagattcggacgacaccgagtcgacgacctcgacggattctgaaccgacaacgatgcacaaggtcgatctgtggtatcagacaggtcgccgtttccggaagacgtggagcgccaacgagtcggtacgatcaagtggtggtggcaccggcgctggaacggggactggcacagggacaagccggaaaaagccaggcaaaccgaagaacattatctccatccatgacttacaaaatgacctcccgtcaaagaagcagcttgctttggagtatgccatcttcggcgacggggctgacgtgtgcagtcacaacgccgcggttgccgaaaagtacgggtatcaggatttggtccacgtctggaagtatgccgcgcttcttcttcgaagagacatcccgcttgagctacatgactggaggcacagcgggcaaccggtgctcgttatcgcaaggaatgtcgcggtccatgcgaacgaggagaaaagagcgggggagactacagcaccagggtccaatctagctggccgagtcagatggggtcatcatcctctggcgcgagacttgattagcgagctcttcgactactttgagaaggtcgccgacattcagatgttggccatgctggcgtgcatatttggcgactactcaattgaagaggaggcggccatcgcagcatcacatcttcctcagccgaagacaccgttgcccatgaaagctccctccttctcgttcgaatattttcccaccgaccccgcgctctggaatttcaattacaagagtcaagccagttcggccataacgactcccaggacagctaatactccggccatgtactactcggatcccccaagctccgccgacgaggtgacgggctccctagaaccgaaatcgcattcttactcgtgcggggagacacctcctaatcctgccagggagcatttgcgggatgttgcccaaacgcagagcctatctacatctcccaacaccaagttctttcaccgttccaactcgactgttgctgccgcgattgctgctagtctgccgcgggcgctagctggcatcgtctcaggctcgcccccggaccaggttcggaagcgcccgagccctgccgagaccatgctgggcaaccttacccccaatgccgttccatgggctggctcggccgtgtctggcgctggcccagacacgcccggaacctcacggacatcgttctcggatgatgagtactggaaagacgacctcttagccatggtcccaattggggtgtcctgcattccggaaaatcaaggccagttcgacgacgacggttggatgtcgaccttcttgattgaccgcgaccgtcgccaagtatattctaattatcgttacgcatacgcggaaatgcttcagatgtggggccagcctctttcccgtctcgagatcatgaagttcgacgtcctcaacgaggacaaactctcccccagcacagccacggccagcaactacgccgaagagagcgcaccgcacaacactcctttctatcccactggaaccacctcgccaacctcaccattcgccgaccgtcgcggtctcttccaagaactcctcaattcaggccgcggcgttgatgtgacagggttttgccggatacatccgggcgtcccgctggaaccggcagagtaccttcgcccagcaccaggcggcgcgacgaatgccagcggtgccgccgtcgccacggccctctcaaacaccacccacaactccactggtcagccgcccataatgaacggtgcagtcggcgtctgccaccggtgcaccgcggagcgggaacacgccgacctggtcccgcaaaccgagctgcaatgtgtctactgctgggcgcccgtcgtcggcctgtacgcgccgtgtgtagcgtgcgggtgcgtcgcacacgagtcgtgcctcgccgagtggcacgccctgggaggcagcgagtgccccgtcggtcacgagtgccggtgcgtggaggaggcgagcagcgagacggcagggagctgggccgggctgcgggctgcggtcctgctcgccggtaatgatggcggcggagataataaggacaggggagccggaggaggatcggccgccggcggcggcggcggggacagcactgcgaccccgcggtcgggttccggaacgcccaggtcgtcgacccggtcaaggcgtaagtctgcgccggcagacgcggccaaattccataatgtatttcgcagggcgaacgactcgaaccctccccgctccccttctcaagcccaattctccggactgggggcgggtcctgaagaatacagtggtgatacggcgggggccgcaatgagagcccgctccagcaacagcagcaggattctaggcgggggcggcgtgttctcctcgcgcaggagggttcacgacggcggcgatatggacagggcgatggaccgcgagagcgcggcgtcgtcgcccggcccgggaacggttaccgttagcggtgttgctggcgggttgctggcgggcgtaaagccgccaccgagaggggaggagccgatctcagcggcacagttgagcctgggaaagcggctgaagaagcagctggaggagtccgggcggccgggtgtgccgcggaggaatacaggggggttagccatgtggaagacgtcgagtggtggtgcgtga

SEQ ID NO: 4779 - protein, 1634 aa, Myceliophthora thermophilia
MPLSFVRLSDAPKKAKPIRSAYESESFDADGAIHVDGLVGSATISPSGRDVALASPEGLAIIDLDSPWSPPRRLSSHGLPWLVVDVQWSPFAARDYWVASTANHRCLVWNLNKRDDSSSGAIEHSLQAHSRAITDVNFSAHHPDFLATCAVDGYVYCWDLRRPRQPVLSFCDWFAGATQVKYNRQDPNVLASAHDRRLHIWDVRRSVEPLKTIDAHTSKIYGVDWNRINSTCLVTCSLDKSIKFWDYGKDGEEPQRVIRTDFPVWRARHTPFGYGLLAMPQTEPGNLFLFDQRPDPETPVDGAVKPVAVFPGHGNHKAKEFLWRSRGGVTNEGIDNRDFQLVSWGEDNELRLHKVEHELLESVGHFKGRPLMKNLILTRKGAPYKTFRTVDDVHRDRRSPTMTDRPGSGGQLRQSALSSGLNAGLRRVGPSWRSTSMKARTNTSKHVDKTQLQIGWMKGITMSKRKSSSDAPGRAGPEDSGIFGPGYDSGWGEPETIQDEFLRISNQLPNVKWENIDMDALTLNASLKGPWGVNGETIFIKVKVDIPKSYPKSKAPRFYVEKSSFMPEETHRKLEHELRELGNRFLQRKQNCLDTAFEYLLGEVDLETSTAFFNNVRDFDDDDALADESSSEEDENDIPAGGSASMSQELSTSTELDPSGTLASAQRQAVTPLPMFCGARFSNDGRLVCFFPTKEEKAKALFALPHPDSSKERSKGEPTFAGFGRLSHDSPPPKHRFHDETSATDDQSEDSDDTESTTSTDSEPTTMHKVDLWYQTGRRFRKTWSANESVRSSGGGTGAGTGTGTGTSRKKPGKPKNIISIHDLQNDLPSKKQLALEYAIFGDGADVCSHNAAVAEKYGYQDLVHVWKYAALLLRRDIPLELHDWRHSGQPVLVIARNVAVHANEEKRAGETTAPGSNLAGRVRWGHHPLARDLISELFDYFEKVADIQMLAMLACIFGDYSIEEEAAIAASHLPQPKTPLPMKAPSFSFEYFPTDPALWNFNYKSQASSAITTPRTANTPAMYYSDPPSSADEVTGSLEPKSHSYSCGETPPNPAREHLRDVAQTQSLSTSPNTKFFHRSNSTVAAAIAASLPRALAGIVSGSPPDQVRKRPSPAETMLGNLTPNAVPWAGSAVSGAGPDTPGTSRTSFSDDEYWKDDLLAMVPIGVSCIPENQGQFDDDGWMSTFLIDRDRRQVYSNYRYAYAEMLQMWGQPLSRLEIMKFDVLNEDKLSPSTATASNYAEESAPHNTPFYPTGTTSPTSPFADRRGLFQELLNSGRGVDVTGFCRIHPGVPLEPAEYLRPAPGGATNASGAAVATALSNTTHNSTGQPPIMNGAVGVCHRCTAEREHADLVPQTELQCVYCWAPVVGLYAPCVACGCVAHESCLAEWHALGGSECPVGHECRCVEEASSETAGSWAGLRAAVLLAGNDGGGDNKDRGAGGGSAAGGGGGDSTATPRSGSGTPRSSTRSRRKSAPADAAKFHNVFRRANDSNPPRSPSQAQFSGLGAGPEEYSGDTAGAAMRARSSNSSRILGGGGVFSSRRRVHDGGDMDRAMDRESAASSPGPGTVTVSGVAGGLLAGVKPPPRGEEPISAAQLSLGKRLKKQLEESGRPGVPRRNTGGLAMWKTSSGGA

SEQ ID NO: 4780 - DNA, 2808 bp, Myceliophthora thermophilia
atgtctgaccacggggattcaccgtcaccacggtcgtcctcgggcccagcgggctccgtgtcaccacccccggcgcctgctacggcaccaacctcaacggcaagcactgagacggcagcctcgcccaagaagcgcatgtcaggatcgacagaaggcaaagtcacgaaacggcgggcggcccgggcctgcgtatcgtgtagggcccgcaaggtacgctgcgatgtggttgagggtgcgccctgcggcaattgccgctgggacgacgtggaatgtattgtccaggagagccgcaggcgaaaaaagaatctcccatacaactgcggcccggcagcagtgggggcgcgtgctggaactgccgaggcacttcgcacgaagagcattggcgccgctcccccggtcatcaccgccaatctcacgaagccagcatttgctccgaacgggtccttctctctccccctgaatggggtcgacggtggacaggcggccggcggtctgctctaccaacagacccctggcgggttcggcaccccggggtccgcggcggcatcggcggccctgacggggtttcctccggtggccccgggaattgcggcctctccagcgctgctgcaccctctcctcaggactgccttcgagcaggccagcgaatggccggccttcatcaagcccttcccggaccgcgtgcttgcggaggaccggcagtatctggctcagaagcaggtcttctcgctgccgtcccttcctctgcaaaacgccctaattgcggctttcatcgagtatgtgtatccgtacatgccgctcctggagctccatgattttctcagggtggtcaacgaccggtccggcgcctcgggcaagatcagcctgttcttgtaccatgctgtcatgttctccgcaacagcttttgtggacgagactctgctgaaggatgccggttacgcgagccggagggacgcaaggagggcctttttctccaggacaaggctcctctacgacttcgactacgagacggatcgcctgatcttggtccagggcttgctgctcatgacgtactggtacgagacgccggatgaccagaaagacacctggcactggatgggcgtggccatttcgctggcccacaccatcggcctccaccgcgacccggccaagacgcccatgatcccgcggaagcagaagctgtggaagcgcgtttggtggtcctgcctcatgcgggaccgcctggtcgcgctcggcatgcgccgtccgacccggatcaagagcgaagatttcgacgtgcccccgttgaacgaggatgatttcgatatcgacccccttccggcggagaacaccctgctggggcctgagtgcgccctgatccgcgacgtcggaatgcaacgcgagctcgccgtcatgtgcatcgagaaggccaagctgtgcatgctcatcggcgacatgctcagggtgcaatactcggtcctcagtcgcagcggcgtgcggcccgagcacaccatcaacagcacccacatgttgctccctaacaagaatcccgagaacatgcaagaagtcgaaaaggtcgaccagaacctgcgggactggttcgccggcctgcctgagccttgccggtaccgcccgctcgattccgtcaccatcaccgatgccaacaaggtcatcgccgtgcagcgcaacctcctccacatgatctaccacaccaccgtctcggccctgcaccgcccgctcttccttccggcctcgcccaccgaagggccccggaccccggtcgaagtgcaggaaacggcccggaagcgcgtgcgcgaggcggccgagcatatcactcgcatggccgccgagatgcgccagcacagcctcgaccggttcctgccgacgaccggcgtgaccgtcatcctgccggccatgattgtgcacatgctcgacaccaagagcctcgacccggacacccgcgccaatgccgtgcggggcctgaaggagtgtctcgtggtgatgaccaacctgcggaacatctatgcagcggcagatttcgcgaccggattcctggatgcgttgctgcggaagggtatgctgggccaggccccccaacctcaaccgccgcagccgacaccgccgttggtggccatgccgggagcgcggccgggcaagatactcaaccgcgtcctggcgccggcgctgaatctcgtccccgagcgcccgtcgacgccgcccccggagaacgtgtttctcaatctgaggacggccagcaacaacaataacgctaataataacaataacggcaccaccgccagcagcctcttccccccgcagagccatcacggccccatcgccacgacacaagcctttatgcccaacgtatcagatgacgccggcgacccgtccgccctcgctgccgccgtcggcgcgaccacgccgccgcataccgacagcgaagatgtagacatggacgtggacgtgtccatggcggatgaggtcatgggcaacggcggcagtagtagcagcaacggcggcaccgggctcgactttaccgccggcactcctgctggtctgggaggtacgagtggcgacagcaccgcgcccggcctgttggctggtgcgggcgccggtgcgggggcgggcgcggggggcaacaactttgattttgaccagtggctgcagttccctgccgagggcgggctcagcacctcggacgactcgttcatgggaggcatgttttcggccgggcccggggatcaccctcatcaggccgggttggagatgggcggtggcgagggggccatcgagcagtggatgagcttgcccgaggggattagccactaa

SEQ ID NO: 4781 - protein, 935 aa, Myceliophthora thermophilia
MSDHGDSPSPRSSSGPAGSVSPPPAPATAPTSTASTETAASPKKRMSGSTEGKVTKRRAARACVSCRARKVRCDVVEGAPCGNCRWDDVECIVQESRRRKKNLPYNCGPAAVGARAGTAEALRTKSIGAAPPVITANLTKPAFAPNGSFSLPLNGVDGGQAAGGLLYQQTPGGFGTPGSAAASAALTGFPPVAPGIAASPALLHPLLRTAFEQASEWPAFIKPFPDRVLAEDRQYLAQKQVFSLPSLPLQNALIAAFIEYVYPYMPLLELHDFLRVVNDRSGASGKISLFLYHAVMFSATAFVDETLLKDAGYASRRDARRAFFSRTRLLYDFDYETDRLILVQGLLLMTYWYETPDDQKDTWHWMGVAISLAHTIGLHRDPAKTPMIPRKQKLWKRVWWSCLMRDRLVALGMRRPTRIKSEDFDVPPLNEDDFDIDPLPAENTLLGPECALIRDVGMQRELAVMCIEKAKLCMLIGDMLRVQYSVLSRSGVRPEHTINSTHMLLPNKNPENMQEVEKVDQNLRDWFAGLPEPCRYRPLDSVTITDANKVIAVQRNLLHMIYHTTVSALHRPLFLPASPTEGPRTPVEVQETARKRVREAAEHITRMAAEMRQHSLDRFLPTTGVTVILPAMIVHMLDTKSLDPDTRANAVRGLKECLVVMTNLRNIYAAADFATGFLDALLRKGMLGQAPQPQPPQPTPPLVAMPGARPGKILNRVLAPALNLVPERPSTPPPENVFLNLRTASNNNNANNNNNGTTASSLFPPQSHHGPIATTQAFMPNVSDDAGDPSALAAAVGATTPPHTDSEDVDMDVDVSMADEVMGNGGSSSSNGGTGLDFTAGTPAGLGGTSGDSTAPGLLAGAGAGAGAGAGGNNFDFDQWLQFPAEGGLSTSDDSFMGGMFSAGPGDHPHQAGLEMGGGEGAIEQWMSLPEGISH

SEQ ID NO: 4782 - DNA, 1278 bp, Myceliophthora thermophilia
atgactttggctggcatgcgagtccttccccgggatggggaggccggcagcgcgcccctcacaaccggcgccatcgccggcattgcttgcggcgccggtgccctcttcttgggtgcgaccagcctgttcatcgtctactttcgccgtcagcgacggtacgcacgggaggactactccgactcggacagcttcgacgacacgatgccacggcgtgccatggcccccgtcgtcacatacaccatggactacaagatcgataacccgcaacaccacgagggctcctcgtacatatactctcccgagcaggcctcctacattctctccccgcaaagcacctccgacgccgccagcgccatgcccacccacccggcttatatcccccgtgctttggtcaggggctcttcaactccgagcaaccgctccgtgtcaaccacctctcctccgccacccttcctgagcctaagcccgccatacccgccctccatctctcactccagcaagatccagccggacgacagcatgatcggggcttaccttgcggccgccgcccaagccgggccccaagcccagtcccaggacagcccacccgaggagtccgatgctgcctcctcctcctccggcccggccatccggcctgcgccgccccgctccgtctcccctaccgacggaagcagcagcgaccacaataaccaccaacagcagcagcagcagcagcagtttcccttacccaacgggctccagcccctgcccgcgaggcgcaagccccgcgcctacaccccgccgcggctcaacctggccgagggcacggcgcagaaccgcagcaggagagagcggccgctgctcggcaaggagcacgccaccatctcgggcccgctcgccttcccccagttctcccaccccccgatcggcccgcctcctcctccggctgttcctcctgctgctgctgctgcttccaggtcgggctggcgccgcgaggaggtcgcggcggacatctgggacggcgagggcgaggagcagtggcactcgcatgcgtccccgcccggcgatggccggcggaccttccgcagccggatcgccctggccggcggcggcggcggcggcagcggcagcggcagcggcagcggtagcaattctggcaggggcaggggcaggggcaggggcaatggcaatggcaagaagaagcacggcaggaagaagtcggacaggggtagcggcggttatggcagcaaccggcactataccgaggtcgagatcgggagagggagcgacatctggtga

SEQ ID NO: 4783 - protein, 425 aa, Myceliophthora thermophilia
MTLAGMRVLPRDGEAGSAPLTTGAIAGIACGAGALFLGATSLFIVYFRRQRRYAREDYSDSDSFDDTMPRRAMAPVVTYTMDYKIDNPQHHEGSSYIYSPEQASYILSPQSTSDAASAMPTHPAYIPRALVRGSSTPSNRSVSTTSPPPPFLSLSPPYPPSISHSSKIQPDDSMIGAYLAAAAQAGPQAQSQDSPPEESDAASSSSGPAIRPAPPRSVSPTDGSSSDHNNHQQQQQQQQFPLPNGLQPLPARRKPRAYTPPRLNLAEGTAQNRSRRERPLLGKEHATISGPLAFPQFSHPPIGPPPPPAVPPAAAAASRSGWRREEVAADIWDGEGEEQWHSHASPPGDGRRTFRSRIALAGGGGGGSGSGSGSGSNSGRGRGRGRGNGNGKKKHGRKKSDRGSGGYGSNRHYTEVEIGRGSDIW

SEQ ID NO: 4784 - DNA, 3876 bp, Myceliophthora thermophilia
atggctgccggcgtcgacttcccgaaggaagcagagcaggcggaaaaggagtcgacctcgcaaccaacgagcgaagaccggggcaatattaatgatactaataacaagggcgctgaagaaaatggctggagtgcataccggcgcatcttccgatacgcggggccctttgagtacaccctccagggcatcgccatcctggcggccattgcatccggcgccggcatcgcgttgcagaatttgattttcggcgagtttgtcaccgtcattacggactatgcttccggcgactcatctagacaagtcttcctcgacgacgttgcagagcttgctcaccgcatcgtgcgcaacatccgccatgcctatctcagggccgccctcagtcaggaagtcgcatatttcgacctgggcaccagcggttctattgcaacgcaggccacgtccaacggccgcctgatccaaggcggtattgccgaaaagttgggcctcaccttccaaggtcttgctgcctttgtcacggccttcatcctcgcctttgtcacccagtggaaactcacgctcatcacgctctgcattgctccggccaccatcatctccatgggcatcgtggctgccatcgaggccgggtacgagaccaagattctcgacattcacgcccaggccaactcattcgccgaaggtgtcctcgccagtgtccgaaccgtccatgccttcgagatgcgtgcgaggctggtggccaagtttgacgagttcctctccgaggcacaccgatgggggaacaagaactcgcctctcttcggcgccctgttctctgttgaatacaccatcatctacctgggattcggtcttgctttttggcaaggtgtccagatgttggcaaggggcgaggttgattcacccggccaaatcttcactgtcctcttatctgtcaccatcggctcgatcaatatcaccatgcttgcgccatactctatcgagttcacccgtgcggcaacctctgccgcttcgctgttcaagctcatcgacaggcagtccgcaatcaacccgttcgacgactcgggcgagaagccgtccgaggtcaccgggctggtggaactcgaaaacgttacatttgcatatcccactcgccccggcgtcacagtcttggataacttctcgctcagagtgcccgccggcaaggtcacggccctggtggtaagcagtgaacccaaccggtttcccatccagggcacacagcccggggggcaacgaaagctgacccgaccccagggacaaagcggctccggcaagagcaccattgtcggtttgattgagaggtggtacaacccctcgtcaggggtcatcaagctggacggacgccccattgacagcctcaatctcagctggctgcgaaagaacgtccggcttgttcagcaggaaccagtcttgttccagggatccgtgtttgacaacatcgcgtatgggctcgtggggaccccttgggagaacgctccccgggaggagcagatggtgcacgtccaagaagcggcgaagacggcgtttgctcacgatttcatctcgaaactgcccaacggctacgagacggacattggacagcgagggagcctcctgtccggtggccagaagcagcggattgctattgcccgcagcatcgtgtctcacccaaaggtcttgctcctcgacgaagccactagcgccctcgatccccatgccgaggcagtagtccagcgggcgttggataaggcggccgagggacgcacgacgatagtcattgcccacaagcttgcgacgattcgcaaggcggacaacatcgtcgtcatgtccaagggccgcatcgtcgagcagggcacgcacgaaggactcgttgctcaggacggtacttatgctcggctggtcaggatccaggacctggcggtcaaggctgccggttcatcgtcagatgccgaaggagaggacactgccgcggacgaagaagggcatcctgccgagctcaccaagaccatgactcggtatgccacggaagaccaggcccggatggagtctcagaaaggacggtatgacttcgagaaccacaagaagctgggcttacttggggtcataatccgcctggccaagttcagtcccgagctcatctggtggtacctctgcgtcctggtggcatgcgttgcagccgccggcgtctttcccggtcaagccattctactctctaggatgatgaatgtgttcacgcttactggcgacgctttgaaggagcgcggcaacttcttcgcttcaatgttcatcgtcctggccgcgggctgcctcgtcgtctactttatattgggttatgcggttaacgtcgtcgcatcggatcttgagttcttcgaccggccagacaacagcaccggagcccttgcgagccgcgtcgactcgcacccgcaagccgtgtttgagctgatgggtttccaagtcgggctcatccttatcgccgtgctcaacgttgtaggttgcgccgtcctgagcctcgcccacacctggaagctgggcctggtgattgttttcggaggtttgcctcccctcctaggcgcgggctggctcaagatccgcctagacatgaggctcgatcacaacgtctccaagaagacctcgactagcgcagctatcgcgtccgaggcgattacggccatccggaccgtttcgtcgctggccatcgaggaccgtgttctttcccgctacacagctgagctggaccacgcagtggcgcagaccgttcagcccatcgcggctgtgatggtttgtttcgggctgacacaggccatcgaatattggttcctggccctaggtttctggtatggctgccgcctcatggcatctgatgaaacgaccctgtacaacttctttgttgccttcatgggcgtgtttttcgccggtcaggccaccgcccagatgtttcagttttcaaccagggctgatgtcgttcaaggcattaccaatgcgaagaacgcggccaattacatgttctggatctctgggctgcaaccaacggtgcgggagaccgacgaaaaccgcgataacagtccaaagtccggcggcccaatctcgttggacagtgtccgattctcgtatcccttacggccggacgccatggttctacggggattgaatctggagctaataacaccgggcaagatcaccaagggccagttcgtggcagtggtcggtgcttcggggtgcggcaagtcgaccgttatcgccatgctcgagcgcttctacgatccgtctaccggcaacatccgcatcgatggcgatgtcctgagcgagcttaacccacggcactaccgccggattgtgtctctcgtccagcaggagccaacgctgttccaaggaagcatccgagagaacattgcgctcggtattgacgacccgacagctcccgtcgacacggccgcatcgtccgccaccgctcaaggtcccacggtctccgactcgcagatcgaagcggccctgcgtgccgctaacgcttgggagttcgtgtgttcgcttcccgatggcctatccaccgcggcagggcccaatggcacgcagctttcggggggccagcgccagcgtattgccattgctcgctcgctgatccggaaccccaagatattgttgcttgacgaggcgaccagcgccctggatacggagagcgagaagattgtgcagagtgccctggccgaggcggccaaggatggggaccgcatcaccgtcgccgtggcgcatcggctgtcgacgatcaaagaggccgacatgatctgcgtgttccacgacggcaagatcgtggagaaggggacacacgaggaattaatcgctctcggagggatgtatcgcaagatgtgcgaggcgcagaacatcgagtaa

SEQ ID NO: 4785 - protein, 1291 aa, Myceliophthora thermophilia
MAAGVDFPKEAEQAEKESTSQPTSEDRGNINDTNNKGAEENGWSAYRRIFRYAGPFEYTLQGIAILAAIASGAGIALQNLIFGEFVTVITDYASGDSSRQVFLDDVAELAHRIVRNIRHAYLRAALSQEVAYFDLGTSGSIATQATSNGRLIQGGIAEKLGLTFQGLAAFVTAFILAFVTQWKLTLITLCIAPATIISMGIVAAIEAGYETKILDIHAQANSFAEGVLASVRTVHAFEMRARLVAKFDEFLSEAHRWGNKNSPLFGALFSVEYTIIYLGFGLAFWQGVQMLARGEVDSPGQIFTVLLSVTIGSINITMLAPYSIEFTRAATSAASLFKLIDRQSAINPFDDSGEKPSEVTGLVELENVTFAYPTRPGVTVLDNFSLRVPAGKVTALVVSSEPNRFPIQGTQPGGQRKLTRPQGQSGSGKSTIVGLIERWYNPSSGVIKLDGRPIDSLNLSWLRKNVRLVQQEPVLFQGSVFDNIAYGLVGTPWENAPREEQMVHVQEAAKTAFAHDFISKLPNGYETDIGQRGSLLSGGQKQRIAIARSIVSHPKVLLLDEATSALDPHAEAVVQRALDKAAEGRTTIVIAHKLATIRKADNIVVMSKGRIVEQGTHEGLVAQDGTYARLVRIQDLAVKAAGSSSDAEGEDTAADEEGHPAELTKTMTRYATEDQARMESQKGRYDFENHKKLGLLGVIIRLAKFSPELIWWYLCVLVACVAAAGVFPGQAILLSRMMNVFTLTGDALKERGNFFASMFIVLAAGCLVVYFILGYAVNVVASDLEFFDRPDNSTGALASRVDSHPQAVFELMGFQVGLILIAVLNVVGCAVLSLAHTWKLGLVIVFGGLPPLLGAGWLKIRLDMRLDHNVSKKTSTSAAIASEAITAIRTVSSLAIEDRVLSRYTAELDHAVAQTVQPIAAVMVCFGLTQAIEYWFLALGFWYGCRLMASDETTLYNFFVAFMGVFFAGQATAQMFQFSTRADVVQGITNAKNAANYMFWISGLQPTVRETDENRDNSPKSGGPISLDSVRFSYPLRPDAMVLRGLNLELITPGKITKGQFVAVVGASGCGKSTVIAMLERFYDPSTGNIRIDGDVLSELNPRHYRRIVSLVQQEPTLFQGSIRENIALGIDDPTAPVDTAASSATAQGPTVSDSQIEAALRAANAWEFVCSLPDGLSTAAGPNGTQLSGGQRQRIAIARSLIRNPKILLLDEATSALDTESEKIVQSALAEAAKDGDRITVAVAHRLSTIKEADMICVFHDGKIVEKGTHEELIALGGMYRKMCEAQNIE

SEQ ID NO: 4786 - DNA, 474 bp, Myceliophthora thermophilia
atgttcgcctctcgccggttgcctggcgttgtcgcccgcctgggcatgaaccagcccgctcgtttgatgtcaacgagacaaggacaggctcgcgtccccagctccatcatctccaccatctccactgctcgccaggcgactgggcgcaatggtttgcttctcaacggcggtcgtagcacattcgcttcgaccataatccgtggtgcgatgcaatctcgaggcgtcgtcgtcgagtcgacggccgccgccctcgtcacggccgccaaggtcggcggtgctggagctgccacgatcggtcttgcgggtgccggtgttggaattggcaacgtcttcgccgcgctcatcaatggcgtcgctcgcaacccggccctgagaggtcagctcttctcgtacgccgtcctgggctttgccctgtccgaagctaccggcctgttcgctatcatgattgctttccttcttctctacgcctactag

SEQ ID NO: 4787 - protein, 157 aa, Myceliophthora thermophilia
MFASRRLPGVVARLGMNQPARLMSTRQGQARVPSSIISTISTARQATGRNGLLLNGGRSTFASTIIRGAMQSRGVVVESTAAALVTAAKVGGAGAATIGLAGAGVGIGNVFAALINGVARNPALRGQLFSYAVLGFALSEATGLFAIMIAFLLLYAY

SEQ ID NO: 4788 - DNA, 2343 bp, Myceliophthora thermophilia
atgggcatctcaggtattaattacccttcccatcgtcttcgtccgctgacccacccgctaaatctccccaaaggacttctcccgctcctcaaatccatccatcgtcccaccgagctcaagaagtacgccggtgaaactttgggcgttgacggctatggctggctccaccgcggcgctgtggcctgcgccattgagcttgcccagggcaagccaactcgcaaatatgtggacttcgctatgcatcgtgtcagaatgttcaagtattttggcgtcaccccgtatgtagtttttgacggcgacttcctccccagcaaggccaaaacagaggctgcccgatccaagcgccgagaagagagcaagaggatcggtctcgagcttctcagggctggcaagccctcacaggcttattctgagcttcagaaggccatcgacgtcaccccggaaatggcacgccacctgattgaggagctcaagaaggctgacgttccgtatgtggtcgccccatacgaagcggatgctcagcttgtctacctcgaacgccaaggcctaatcagcggcatcgtttccgaagattccgacttgctggtgtttggtgccaagcgcctcttgacgaaattggaccagcacgggcagtgcgttgagatcaaccggagagacttctgtgctgtccgcgagatctcccttaccggttggacagaccgcgagtttcggcatatggccatcctcagcggctgtgactacctggacggcgtcagcaacatcggtttgaagacggcatatcgtctggttcggaagcacaaaaccccggaacgcatcataaaaatgctgcgcttcgatggaaaacaccagatccccgactcctacctcgaagatttcaagcaagccgagctcacatttctccaccaacgggtattctgtcccaagaaacaagacattgttttcttgaccgagttggacccttcatccaacccagacgagatgcgcttcattggtgcaccggtcgagacggagcttgctaggtccattgccattggcgatgttaaccccattaccaaagagcgcatcgttgttccgcgctcgcctggtaaacggaggatcagccaagctctcgccccagccagtggaccgccgagaactcttgggaagccgatcagcgaatacttcaaagacaggagtgaccgccggattcctctcggtgaaatggatcccaattgcttcgccgttgatcccaaccacaacagcagtacaaccgcggaggaaaggcctcgcccgatcgtgttcccgctccctagaccgtacgttgagggggcagaggaagccttggagagcacacctcggccgtacactagcaatgctcggcctcttcgtcgcaagactgaacccatctcgaagctcctcggcctggacgtgttcgagtcttcggaaaatcgccgtcgaacgaccggcccggtcattcaagtctaccaggacccaaccgcttcgagtcggccgccaaagaaagcccgtctatgtgacgaacagacgttcgatgaaagcgccgatgggaccccggagaagagcaaattcttctcctcaacgaagccgaacaaatcggccaagaagaaggcggacaaattgctgatgtcggacgactcaatcgaggaggccttccgaagtcttccggatcattcttggcggtctgagaagccgcccaaacccaccgacgacattgttatattccacgagccctcccccaagaagcagacggacgaggttcccgccgctgaatcgccaatcgagggctgcgaggatcatgccgagcatgaagtcgaagtacccgcttcctctcccactcaacaaggaccggcgaaggagtgtaacgatgacagccgctcggcatcaatgacgcctctgggggagcttctcaaagaattttcgtatggcacaggacacgcgcgcacccgggtcattcacgggcttcctacgccggcgtccagcatacaacagacagcgactccgaagtgtaccggcccgaggaacacgcaaacccccatgccgacccccttgcagcgtatcggggccagggcgttgcagcgcgacagattccagtcgacgcccccaaccccggggattgtttcgtccggcgacaggtcgaacaaattcgactcgttgcctgtaaacccagcattcgtcccgttgccgagagtcgatgttgaggaggtggaggcgctaaacaagcccttgggcagcgaggaccaaatcatccctgatagtgacggcgaggatgatgatgatgtgggggatgaaccaatgtcctcgagcgctgtcagacggctaaacttgacgaagtctttatattcttga

SEQ ID NO: 4789 - protein, 780 aa, Myceliophthora thermophilia
MGISGINYPSHRLRPLTHPLNLPKGLLPLLKSIHRPTELKKYAGETLGVDGYGWLHRGAVACAIELAQGKPTRKYVDFAMHRVRMFKYFGVTPYVVFDGDFLPSKAKTEAARSKRREESKRIGLELLRAGKPSQAYSELQKAIDVTPEMARHLIEELKKADVPYVVAPYEADAQLVYLERQGLISGIVSEDSDLLVFGAKRLLTKLDQHGQCVEINRRDFCAVREISLTGWTDREFRHMAILSGCDYLDGVSNIGLKTAYRLVRKHKTPERIIKMLRFDGKHQIPDSYLEDFKQAELTFLHQRVFCPKKQDIVFLTELDPSSNPDEMRFIGAPVETELARSIAIGDVNPITKERIVVPRSPGKRRISQALAPASGPPRTLGKPISEYFKDRSDRRIPLGEMDPNCFAVDPNHNSSTTAEERPRPIVFPLPRPYVEGAEEALESTPRPYTSNARPLRRKTEPISKLLGLDVFESSENRRRTTGPVIQVYQDPTASSRPPKKARLCDEQTFDESADGTPEKSKFFSSTKPNKSAKKKADKLLMSDDSIEEAFRSLPDHSWRSEKPPKPTDDIVIFHEPSPKKQTDEVPAAESPIEGCEDHAEHEVEVPASSPTQQGPAKECNDDSRSASMTPLGELLKEFSYGTGHARTRVIHGLPTPASSIQQTATPKCTGPRNTQTPMPTPLQRIGARALQRDRFQSTPPTPGIVSSGDRSNKFDSLPVNPAFVPLPRVDVEEVEALNKPLGSEDQIIPDSDGEDDDDVGDEPMSSSAVRRLNLTKSLYS

SEQ ID NO: 4790 - DNA, 2241 bp, Myceliophthora thermophilia
atgtgcacctacgactacacgccttacactggctgcgaggacggcccgcagcattattacatccagtgggtgaagtgcgatatcgccgtcgagagggggaggtattgttcgctggatgcttcacagaaggtcgagcagctcaggaagctgtccgtcaacgtcctctcctgcccgctccacggacccattgccgttcagcagtttgtgctcgaagcggcaaatgcacggctgcccgagaaagagcgcgagagatcccgggcacgaagcaacgctcgtcgaggcccagtgtcaagaggaaggacccctaggagagacccccctgatacgggagccggggaaccggtgcggagacaggttcgcaagcgaagatcaagacgcgagatagccgtggggtcccccgattccgagttatccgacgcgtcgtcgtcgtcccggcgcagggtcgatggctgggcgacgaggagaggccaccaggatgccgctcacgagaggcgaacgacccgagatgcccagccgcatggacataggagatcagcatccgccgatgccggcgtcgcaatcccgagtcatccacctccgcccctgtcgatgcgacacggccagagcgaagtgtcgctgcccctcaagacaggattcggcgcggaagggaaggaagatgaccaaggctccactaccgggcgccgacagtcacgccctaggaactcgctggacaccgggcgtgccgctcttggcattgtagggctgccctcaagcccggacatgcaccgtcggggcagcattgatcgagctaagagcgaattggggctgaaaccgggagtcgagagcgcgccggagcccatgccggcatcgaaaagcgccgtatcccccgccagcgacagctccccggaccagaacccggaccttcctttcagcaccccaggacgcttgggccgcaggacgggaacgcgctccatccgcgatcggagcgtagacaccacgatgcggcggatcgatgaagacgttgctcaggacgagaacaccggggcgacacaggatacggctgcttcgactacccggagcttgttatccaccacaggctcctcagcgccgcaacaacaaggccaagacgcccattcccacaggcgatccaactcccgaccccgcctcaacagcctccagatccctccagtcccccagcggcagagtaccagcaataagtgccaacaggaggcctactcggcgcccacggccatccctcccgaaacggacttcaacctccccatcccgacaacccgccaacgccgcgccgggtcactccgccacatcgaccttccgtcacccactaccactaccaacatccaacagcactccccaccaacccctcgcttgaccggcggcgacgggggcgcgggtgcagagacggcctcgatccgcagcgcgcgctcgtcccggcggtgcctagaggaccaggtggccgaggcccgcaagtgggccgcagcgcgcgagcacctgcccgcgcccgcgtcgctggccgcccggccgtccatgtccgagatgaacctgccgctacccccgtccggtccggcgggtccagcgggagagagggacagggagaggggttccgtggatagtggttacctgagcggcgggggtcaccagcaccaggcccaagcccaaccccagccccagcacccgcgcccgcaccagaagcttcaacactcgccgcattatatccctccggagcagctgtggaatcggggggatgtggccagggcgacggcagcggcgtcggcggggggtgctagcggtgtcagccccacggaggcctcctcgtctcgcggcggcggcggcaagttgcaaaaggcgccgccgccgctgccacaaccaggtcagggacaacaacaacaacagcagctgcagcagcagagtgtgcaaggacaatggcaaggactggggctggggttggttcaaggagcaggaggaggaccgcagcaacaacaacaacaacagcagcagcagcatacacggccggtcccggcgccgctgaatctggcgaacagcggcagcggcaccgggatgccggcgtcgttggcgtcaccgggcctccggtcggatacgagtgtggatggcggtggttctattggcaagggcgccaaagcgacgctgctgcagcggatggggctgaggaagaagtttagcggtctgatatcgcgggaccgggagcgtgctgggcagaggagcgaggtcggggtggaaagctag

SEQ ID NO: 4791 - protein, 746 aa, Myceliophthora thermophilia
MCTYDYTPYTGCEDGPQHYYIQWVKCDIAVERGRYCSLDASQKVEQLRKLSVNVLSCPLHGPIAVQQFVLEAANARLPEKERERSRARSNARRGPVSRGRTPRRDPPDTGAGEPVRRQVRKRRSRREIAVGSPDSELSDASSSSRRRVDGWATRRGHQDAAHERRTTRDAQPHGHRRSASADAGVAIPSHPPPPLSMRHGQSEVSLPLKTGFGAEGKEDDQGSTTGRRQSRPRNSLDTGRAALGIVGLPSSPDMHRRGSIDRAKSELGLKPGVESAPEPMPASKSAVSPASDSSPDQNPDLPFSTPGRLGRRTGTRSIRDRSVDTTMRRIDEDVAQDENTGATQDTAASTTRSLLSTTGSSAPQQQGQDAHSHRRSNSRPRLNSLQIPPVPQRQSTSNKCQQEAYSAPTAIPPETDFNLPIPTTRQRRAGSLRHIDLPSPTTTTNIQQHSPPTPRLTGGDGGAGAETASIRSARSSRRCLEDQVAEARKWAAAREHLPAPASLAARPSMSEMNLPLPPSGPAGPAGERDRERGSVDSGYLSGGGHQHQAQAQPQPQHPRPHQKLQHSPHYIPPEQLWNRGDVARATAAASAGGASGVSPTEASSSRGGGGKLQKAPPPLPQPGQGQQQQQQLQQQSVQGQWQGLGLGLVQGAGGGPQQQQQQQQQQHTRPVPAPLNLANSGSGTGMPASLASPGLRSDTSVDGGGSIGKGAKATLLQRMGLRKKFSGLISRDRERAGQRSEVGVES

SEQ ID NO: 4792 - DNA, 4443 bp, Myceliophthora thermophilia
atggcccaaccgtctcccgtttcgtgtgtgcgcgtcgacgactcgttcggccctcacgccggcgactgtcgcggaggcttcgacttcacgctactctttgaggagacgatcttgaggttggcgcctgccggactgctcctcatcgcgcttccgctgcgcgtctggtacctgtcaaagctgtcgagaaagctagtatctgccaaacgcgcgctgccaatcaagatagtcgcctggatactcctcggatcgctacagctcgctacactagtcctgtgggctctcccgtccgccgcccggacgaccactactctaccctcggctgctgtcgtcttggcctccacggttggactctgtgtcctttcttccctggagcacacgcgtctcgtacgcccctcgacgtccatcggcgtcttcctgttcgccacgctcttgtgcgacattgcctacaccaggacgctttggctccgagcgggagaccagctacaccacaatattgccatccttgccacggccgcggtagccaccaaggcctctatccttgtactcgaagctctcgacaagcgcggcacctttcgtcccgagttccaggactacccgccagaggccacgagcagcatcttcaaccgcgccttcttctggtggctcaaccccctgttcaagcaggggtttcgccgcgatcttgacgttgacgacttgttcctgctcgataaacacctacgcgcgtcatacggattcgcgcgttttcagtcactttggaactctaaaaagtccccctattctctgctgtgggcatcctatcgcgtcctcaagtggccggttctccagacgatcctgccacgggcctgctacactgccctctcgttctgccagccgtttctcatcaaccacgcgatcgtgttatcccaggagccggttaccaatgtcagcacgcaaaaaggatacggcctcattggcgcgtacatcttggtctacggcggcatcgcgctcgccatgggccaataccagcatcgcacgtaccgcagtattgccatgctccgcgccggccttgtctccatcatctaccgtaagacgagcaccgtgagcctcaggggaatcgatccagccacctcgatgaccctgatgagcgccgacattgagcgcatcgtccaaggcttccagacaatgcacgagatctggggcaactcgatcgaggtcgcgctggccatctacctcctcgaacggcagctaggggttgcgtgtgtggtgcctgttgccgtctccatcttctccctgctgggctccatcgtggccatgaactttatcatgtcccggcaggccatgtggctcgaggccatcgagaagcgcatctcggccacgtcggccatgctctcctcgatgaagggcgtcaagatgtgcgggctcaaagacacgctgctctccagtctgcagcagctgcgcgtcgatgagctgagaatctccaagaaattccggaggttgatcatctggaacatgctattcgcctacatgacgcaggtcttcgcgcccgtcctgaccttcctggtgttctccatccgcgcccgcgacaccggggataagacgctggacacggcgcgcgtcttcacgtcgctatccctgtttgccctgctctcggagcccctggcctcgctcgtcatggccctcgccgcctacctgggggccgtcggcagtttcgtccgcatccagcagttcctcgagtccgaggagcggccggacatgcgcaagcccgaggccgagccgaccgagaagccgcggatcgacgagtcggccgcagatgccgtcgtcgttcagggcggtagcttcggctgggaccccgagaaggagcccatcctcgaggacatcaccatgtcggtcccctggcgcaagctgaccatggtcgtcggccccgtcggctgcggcaagtcgaccctgctgctgtccatcctgggcgaggtgcccgccctcgcgggatcggtgcgcctcgggtccgccagcgtcgcctactgctcccaggacccctggcacatgaacggcaccatccgccaggccatcgtcggctgcgaagagtacgacgagatgtggtacgcccgggtcgttcacgcctgctcccttcggagggacttccgagagctgccgctcggcgattccacaaaaatcggaagcggcggcatcgccctgagcgggggccagagccagcgcattgcacttgctcgggccgtatatgcccgcagaaagattgtcattctggacgatgtcctgggtgggctcgacaacacaactgagaaccacgtgttccacagcctgctcggcgagaagggcctgctccgtggtatggaggctaccgtcctccttgtttcgtcttctgcaaaacgcctcccgtactcggatcacatcgtgtgtctgggctcggacggtaagatcgattcccagggcacatttgcccagctcgacgccgctggaggctacgtgtcctcgttctgcttgccccacgccgactgggcctacacccccgaggatgaagaccagagacccgaggtcgcgctcgagaagctcccgccgagcttgacgacggtggaggaccgatctggggtggagggggattcgagtgcctcgagcacgtcgagcaagacggcctacaacaacaacagcaacaacaacaacaacaacgccgacggcggggacgggatgagccggcgcaccggggacatccagatctacctctactacatcaagtcggtcggctggtgggcgaccctcatcttcgtctttgccatctctggctttgctttctgcctctcgttccccaccatctgggtggaatggtgggccgcctacaacgaggacgatcccaatggcaaccttggatactggctcggcatatatgccatgctcggtggcgtcgccattatctgcttggtcctcagttgctggcaaatgatcatgacaatggttccccgatccggcgagaagttccatttcgccctgctcagcgccgttctcaacaaccccatgtccttcttcgtcaacacggactcaggagtcaccctgaatcgattcagccaggacttgcagctcattgatatggaactgcccatctcggcactgaacaccttcgcgactcttgtcatgtgtctcgcgcaaatggcgctcatcggctacggctctgtatacgcggcgatctcgttcccagttgtgctggtgtccctgtatatcatccagaaggtgtatctgcgcacatcgcggcagttgcgtctcatggacctcgagaccaaggcgccgctctactcgctgtttgaggagtccctgaacggtatcgccaccatccgcgcgttccggtggcaggacaagctcaacgacaagaaccacgagcttctggaccgctcccagcggcccttctacctgctcttctcggtccagcgctggctcacactcgtcctcgacctggtggtcgcggccatcgccgtgctgttggtcgtcttggtcgtcgccctgcgcggcactctcgcggcagggggcgtcggcctcgccctgctcaacgtgatccagttcagccagaacatcaagctgctggtctcgttctggacgaccctcgaaacgcacatcggctccgtggcccgcatcaagagcttcaccgagacggccgtgcccgaggacctacccgaggagaaccagcagcccccgccgggttggccatcggcgggcgccatcgagtttagcaacctgtcggcctcatacaaccgcgacgagctcgtattgaaagaggtctgcctgtccatcaaggcgggagagaagattgggatctgcgggcggacgggcagcggcaagacgtccctcatcatgacgctcttccggctcgtggacatgcagggcgggtcgatcagcgtggacggggtggacatctcgacgctgccgcggcaggaggtgcgcagcaagatcgtcgccgtgccgcagcacccgttcctcctcaagggctccgtccgtctcaacgcggacccgatgggccaggcgtccgaccaggacatcaccgcggcgctacagtgcgtccagctgatggaggcggtcgagaagaacggcgggctcgacgccgacatcgacgacctcaacctgtcagtcggccagaagcagctgttctgtctcgccagggccatgctccgccccagtaccatcctcatcctcgacgaggccaccagcagcatcgacgccaagactgaggagaccatgcagcgtcttattcggaggaagttcgccaaccacaccgtcatcgcggtggctcaccgcatcgagaccatcatggactttgacaaggtggcggttctcgacgcgggaaggctcgtagaatttgacaacccgtataagctcctcgagtcgccagggtccgcattcacaaagctgtactgcgcagcactggcagaggaggaggaggacttagataagaagcggccgacatga

SEQ ID NO: 4793 - protein, 1480 aa, Myceliophthora thermophilia
MAQPSPVSCVRVDDSFGPHAGDCRGGFDFTLLFEETILRLAPAGLLLIALPLRVWYLSKLSRKLVSAKRALPIKIVAWILLGSLQLATLVLWALPSAARTTTTLPSAAVVLASTVGLCVLSSLEHTRLVRPSTSIGVFLFATLLCDIAYTRTLWLRAGDQLHHNIAILATAAVATKASILVLEALDKRGTFRPEFQDYPPEATSSIFNRAFFWWLNPLFKQGFRRDLDVDDLFLLDKHLRASYGFARFQSLWNSKKSPYSLLWASYRVLKWPVLQTILPRACYTALSFCQPFLINHAIVLSQEPVTNVSTQKGYGLIGAYILVYGGIALAMGQYQHRTYRSIAMLRAGLVSIIYRKTSTVSLRGIDPATSMTLMSADIERIVQGFQTMHEIWGNSIEVALAIYLLERQLGVACVVPVAVSIFSLLGSIVAMNFIMSRQAMWLEAIEKRISATSAMLSSMKGVKMCGLKDTLLSSLQQLRVDELRISKKFRRLIIWNMLFAYMTQVFAPVLTFLVFSIRARDTGDKTLDTARVFTSLSLFALLSEPLASLVMALAAYLGAVGSFVRIQQFLESEERPDMRKPEAEPTEKPRIDESAADAVVVQGGSFGWDPEKEPILEDITMSVPWRKLTMVVGPVGCGKSTLLLSILGEVPALAGSVRLGSASVAYCSQDPWHMNGTIRQAIVGCEEYDEMWYARVVHACSLRRDFRELPLGDSTKIGSGGIALSGGQSQRIALARAVYARRKIVILDDVLGGLDNTTENHVFHSLLGEKGLLRGMEATVLLVSSSAKRLPYSDHIVCLGSDGKIDSQGTFAQLDAAGGYVSSFCLPHADWAYTPEDEDQRPEVALEKLPPSLTTVEDRSGVEGDSSASSTSSKTAYNNNSNNNNNNADGGDGMSRRTGDIQIYLYYIKSVGWWATLIFVFAISGFAFCLSFPTIWVEWWAAYNEDDPNGNLGYWLGIYAMLGGVAIICLVLSCWQMIMTMVPRSGEKFHFALLSAVLNNPMSFFVNTDSGVTLNRFSQDLQLIDMELPISALNTFATLVMCLAQMALIGYGSVYAAISFPVVLVSLYIIQKVYLRTSRQLRLMDLETKAPLYSLFEESLNGIATIRAFRWQDKLNDKNHELLDRSQRPFYLLFSVQRWLTLVLDLVVAAIAVLLVVLVVALRGTLAAGGVGLALLNVIQFSQNIKLLVSFWTTLETHIGSVARIKSFTETAVPEDLPEENQQPPPGWPSAGAIEFSNLSASYNRDELVLKEVCLSIKAGEKIGICGRTGSGKTSLIMTLFRLVDMQGGSISVDGVDISTLPRQEVRSKIVAVPQHPFLLKGSVRLNADPMGQASDQDITAALQCVQLMEAVEKNGGLDADIDDLNLSVGQKQLFCLARAMLRPSTILILDEATSSIDAKTEETMQRLIRRKFANHTVIAVAHRIETIMDFDKVAVLDAGRLVEFDNPYKLLESPGSAFTKLYCAALAEEEEDLDKKRPT

SEQ ID NO: 4794 - DNA, 369 bp, Myceliophthora thermophilia
atggactccccgtcgacaaaccccaaggaccagtcccaacagccctacgtccgagtttcccaggtcgatgtcgatccggatccggatccggatcccggtcacgagaggagagatgcccagtccagctccgatgccgaaaaggatccccaagaggaagcggagccgtctcagaaatcctacgctcgggtagtcagcccggccgtgctcaaccaaagccaacaactcgagggctgcgacggcctcgaaggctggtatgccttctggtgtcctgccgcagcctattccgaaatctggacctgggtccgtgagcgcgccaacgcgacgctcgacagcgacctaaccagccaggatccaacgggcaggagataa

SEQ ID NO: 4795 - protein, 122 aa, Myceliophthora thermophilia
MDSPSTNPKDQSQQPYVRVSQVDVDPDPDPDPGHERRDAQSSSDAEKDPQEEAEPSQKSYARVVSPAVLNQSQQLEGCDGLEGWYAFWCPAAAYSEIWTWVRERANATLDSDLTSQDPTGRR

SEQ ID NO: 4796 - DNA, 771 bp, Myceliophthora thermophilia
atggctgcgacgactgccattaaccggaggcgggatccgtacgagggcatggtcgtgaccgggttcgagggcggcatcacgacgcgcatcctagcgcacccgcggcgatccttcgccttcgaggtgaccttcgacctcgcgcacccgcgcctggtcgccctggccgggcagagaccgccgccggcccacttccacccgtaccaggccgagtacgtcgaggtgacggccggccggctgatcgtcgagctcgagggccgccggcacctgctcaccccgcgctccggcgagttcgtcatcccccgctgggcaaaccaccgcctgtacccccctcctccgccgccggggaaggagggtgctactgctcgtgatgatggccgccgtcggggcgagggcggcgacgaggatgggaagacgacccggttcttgctctccggcgaggatacgcccaggccgttccggctagacgccgtcttctttgagaattggtatgcctatcaggacgaggtggtcctgcgggggaagaaggtcgatatcctgcaggtcatgtctacgttcgacgctggcggctcgtacctttccctcccgtggtgggtgccctttggccgcaccatctcactggtcctaggcgtggtgcttgggaggtggattgctgcgttgctgggctaccaaccgttctaccgccagtggacgacggattgggacacggcggtggagaagatggagcaatcgttgtttcagagacgttttgcggacaagaccaagactgcatga

SEQ ID NO: 4797 - protein, 256 aa, Myceliophthora thermophilia
MAATTAINRRRDPYEGMVVTGFEGGITTRILAHPRRSFAFEVTFDLAHPRLVALAGQRPPPAHFHPYQAEYVEVTAGRLIVELEGRRHLLTPRSGEFVIPRWANHRLYPPPPPPGKEGATARDDGRRRGEGGDEDGKTTRFLLSGEDTPRPFRLDAVFFENWYAYQDEVVLRGKKVDILQVMSTFDAGGSYLSLPWWVPFGRTISLVLGVVLGRWIAALLGYQPFYRQWTTDWDTAVEKMEQSLFQRRFADKTKTA

SEQ ID NO: 4798 - DNA, 324 bp, Myceliophthora thermophilia
atgcctgttcgcattcccgctgctacgaaaaccgaggtcttctgcatgggcgctgctggcgtcaccgggtttgcgcctttctacctgatggcccccggcgccgaggagcgtctgtctcgtcaaaccgtcaagtgggctcccagctgggagcgcaacatcacctttttcaggaaccccgttgaaaggggcatccagcgcatatcgccgccggttgagcggactgtcaagaggattgaacacggtcttcccctcgagaaggcagccaagaggacaaacacgaccctcaggaggaactttgagaggttgggcttcaagcctacctga

SEQ ID NO: 4799 - protein, 107 aa, Myceliophthora thermophilia
MPVRIPAATKTEVFCMGAAGVTGFAPFYLMAPGAEERLSRQTVKWAPSWERNITFFRNPVERGIQRISPPVERTVKRIEHGLPLEKAAKRTNTTLRRNFERLGFKPT

SEQ ID NO: 4800 - DNA, 999 bp, Myceliophthora thermophilia
atggctcaccagcgatacgaggcgggactggagccggctcggcaggactacccggaggtaacgcaggggtatgggtatggcaaccaacattaccaacagccgccgcagccataccagcaatcacggccatactacccgcagtcctatgacaacctgatatcgacgacaccgccaaagcaggatgccacagcatggggcagcacgcccgccgcgtcgccctactgctcggccgcgcagccagccatgtcccagtttgagcccgagcccaaatctccttccgccaggacgatatgcggctgcagcctgcccgtcttcgtgctgtcctgcatcatcgccctcctagcagctgccgtcgtcgggctagccgcggcgacgggcgtccaagcccagcgcgccagcagcgccgagttcgatctgtctgaactcagggcctccgtggcggggaacagcaccgcctcccaagggtcgaatgccccggtcgtaatcgacgacgggtgttccgagaacccggatagcgtcgacaagacgatatacacttccttcagccttctcggtgcgcgaaagttcaggcggtactgcaacaaggacgcgccgcgcccgcccctcctctcgctcttcacggccgactttgcgacctgcatggacgcctgcgcggcctacacgcagtacgtgccgagctcgttcggcggcgcaaccgccaacacgagcctcaccgtctgtgccgccgtcagcttcatccccgcctggaccgacaaggcgatcgccgacgccggcggcgccccgggaaactgctacctcaagggcgggccccagaccgaggcgctgctgaccacgcccaacatcggcgtcgactgccacgctgccatctacgcgggagcggactcatcctcgggcggggacgaggacggcggagacaacaccaatcggcgcggggccgtcgtcgtcgccgtcttcgtcgcggtcgatggccgtcgaactgagggtgcctcgattgattga

SEQ ID NO: 4801 - protein, 332 aa, Myceliophthora thermophilia
MAHQRYEAGLEPARQDYPEVTQGYGYGNQHYQQPPQPYQQSRPYYPQSYDNLISTTPPKQDATAWGSTPAASPYCSAAQPAMSQFEPEPKSPSARTICGCSLPVFVLSCIIALLAAAVVGLAAATGVQAQRASSAEFDLSELRASVAGNSTASQGSNAPVVIDDGCSENPDSVDKTIYTSFSLLGARKFRRYCNKDAPRPPLLSLFTADFATCMDACAAYTQYVPSSFGGATANTSLTVCAAVSFIPAWTDKAIADAGGAPGNCYLKGGPQTEALLTTPNIGVDCHAAIYAGADSSSGGDEDGGDNTNRRGAVVVAVFVAVDGRRTEGASID

SEQ ID NO: 4802 - DNA, 1218 bp, Myceliophthora thermophilia
atgccgttccagacaacccaagatcaacgccgctaccgccctctgaccccttctcccctcaatcccaacacctatctcaatggcgatcgcgaccaccaggggcagcagcggccccaatggcccaacgggacatcaagacgaccgctcaaggtcgttcgctgcaacacctcttcgcgaatcgcgcagagatacgccgcgctggcgaacgagagcccgacccagcgcctgctccgccagaaagcagccgcggcctggcagctgaccggagcgctgcaagcccgtcgtcaccaagcgccaccggagccccaacggtccgtccacttcgagaccgggccagaactccaccaccaccaccaccaccaccaccaccaccaccaccatcaccatcactgccagcagcagcagcagcagcagcagcagtctagtagcgaacattccttcacatgcccctcaaccacctcgatgaagtccacagccacggctacgaccacaagcaacgccgcggcctcaacctcgaccatgataacggccaccaggtcgggccccgccggcggaaactggacgacaagcgccgtcgccgccctggccatgtccgccctcccggcagacgaagagtcagacctttcggttccgggagccggtagtgagaacgcgaacaagaacgcgaacaagaacgaggaagagaacgtagatcaagctgatatcggcctgttgctgctggtcaagaaccagcgcactggcgccggcgccggcgccggtgctggtgcagagcggggcagtacttctagcttcgaacgatatcgggacgtttcaacggctggtgacggtgggtgcggtgataaattcagcctgcccgccggtcgtggcggcagcgtcggcggcgtcggcggcgtcggcggcggcggcagtgatagtgctggtggtggtgctggtggtggcggcagcagcggggacagcgggacctgtcccttccgcttggctacgtcaccccgggtgttatcgctggggtttgagcggccgttgctgccgctgcatactgccgtcaagcagcgggcggggaggcgccgcttcggggaagggaatggttatggtgccggtgccggtcgtgatggtcgcgcttccaggttgcggcgcgttatgcttatggtggcggtgttgttgggcttggcgttggtccgtggcctcacaaccggatttcgtacgagccgtacagagtag

SEQ ID NO: 4803 - protein, 405 aa, Myceliophthora thermophilia
MPFQTTQDQRRYRPLTPSPLNPNTYLNGDRDHQGQQRPQWPNGTSRRPLKVVRCNTSSRIAQRYAALANESPTQRLLRQKAAAAWQLTGALQARRHQAPPEPQRSVHFETGPELHHHHHHHHHHHHHHHHCQQQQQQQQQSSSEHSFTCPSTTSMKSTATATTTSNAAASTSTMITATRSGPAGGNWTTSAVAALAMSALPADEESDLSVPGAGSENANKNANKNEEENVDQADIGLLLLVKNQRTGAGAGAGAGAERGSTSSFERYRDVSTAGDGGCGDKFSLPAGRGGSVGGVGGVGGGGSDSAGGGAGGGGSSGDSGTCPFRLATSPRVLSLGFERPLLPLHTAVKQRAGRRRFGEGNGYGAGAGRDGRASRLRRVMLMVAVLLGLALVRGLTTGFRTSRTE

SEQ ID NO: 4804 - DNA, 1884 bp, Myceliophthora thermophilia
atggcatgggacgagacttcgtggtcgaactcgacgttgccggacaactcgacactaccgccaccaaactcgacaatatggaccattccccccaacccagggaggtcccttcaaccagacattatcgcctgcgccgtgataaccttcattatcgcctccatcttcgttgctctccgcttttacactcgaggctggctcaacaatgtcctcggggcctcagactggtgcattctgcccgctcttctctgcgcagccggagtgacagcgagttcgcttgagcaggtggtacgcggcgcagggaaacacgcttgggaagttgacatatatgcgctgccgaagtttgaacgcgcgtcctggtacggcattctgttctacaacctcagcctcaccctcagcagaatctcgatcatccttctctacaatcgcatcttcacctacacctggatcaagcgggccatccgggtcgtcttgatactcgtcatcgccatcggcatctggcttgtcgtgtccgtctgcaccgcttgcgtacccctccaggctttttgggactggtctctgttctacaaacaacccgtcttctgccagccgccgaacctgtggtgggcaaacgctgggcttcatatcgccagcgatctggttgttatggcacttccatatgcaattatcggcgtattcgccctcggtttctttgtctgcatcatctccattgtccgtctcgtcactcttatcgacatcaccaggtcgcgatcattggacgccgtgtacaccggcaccaacttggtctactggaccaccgtcgaagtcaacgcgtccatcacctgcgcctgcattatgacgctcaaacccctcattcagcgtgtcttcccgcaactcctctctccaagcaaaatcgttcgcgagccccccactctccaatggatcacgcccatcgaacacgacggtgacaacgacgatgacaacaacgattacgacgaccaccgccgcgaaggcatgcaacgcatccacgacgacaacaactgccgccattcacactacgcgacggccagccccctgacgaggcgggaaagccacacgtccgcctacaccgcccagacacgtcgcggcagcgtcggcgtcggcgtgggcctttaccataacaatcaccaccatgaggagacgctcgagaaatcgcgctactatcacaacttcaccgcggcgccgaagaaggaaagcaacggcgccgactacgacctcgaccgtgacctcgacctcgaggcccagcgcacgtgcagcaactgcagtccggtgtcgtgggggtggccgtggccggcgagcgaggacgggccgccaatgcgcggggacaagagcggtggcagtgggatgcatagaaagaggagcaggagcaggagcaagaggagcagcaccggcaccggccgcagtcgcagcagcgacagcagtagtagtaataacaacagcagcagcagcagcagcagcgccgatgtgccacctgagacgggagatcggcaaacagcaagaggacgggctgagaaggccgggggacgggaaagagggagggcgagaggcgctgaagggcacaacacgccgccgttggagtcggaactggcgaggtatgtgctgcgggcaccgccgcgggcgcatctgcggaaaccgccgccaccacccccgacgccagtatcagtgaggtcagagccgtcgacggtggagaatccaggatacggtccgaaatcgggttcgaccacgtccgggtcccgggaagtgattagggagagttggagggaagtagtagagttgcgggaggggacggcgagaaggtttccgctgaagaccggggttggaatggaacgattcaaagaggcggcgggtacgggccgggaccgtgcttag

SEQ ID NO: 4805 - protein, 627 aa, Myceliophthora thermophilia
MAWDETSWSNSTLPDNSTLPPPNSTIWTIPPNPGRSLQPDIIACAVITFIIASIFVALRFYTRGWLNNVLGASDWCILPALLCAAGVTASSLEQVVRGAGKHAWEVDIYALPKFERASWYGILFYNLSLTLSRISIILLYNRIFTYTWIKRAIRVVLILVIAIGIWLVVSVCTACVPLQAFWDWSLFYKQPVFCQPPNLWWANAGLHIASDLVVMALPYAIIGVFALGFFVCIISIVRLVTLIDITRSRSLDAVYTGTNLVYWTTVEVNASITCACIMTLKPLIQRVFPQLLSPSKIVREPPTLQWITPIEHDGDNDDDNNDYDDHRREGMQRIHDDNNCRHSHYATASPLTRRESHTSAYTAQTRRGSVGVGVGLYHNNHHHEETLEKSRYYHNFTAAPKKESNGADYDLDRDLDLEAQRTCSNCSPVSWGWPWPASEDGPPMRGDKSGGSGMHRKRSRSRSKRSSTGTGRSRSSDSSSSNNNSSSSSSSADVPPETGDRQTARGRAEKAGGRERGRARGAEGHNTPPLESELARYVLRAPPRAHLRKPPPPPPTPVSVRSEPSTVENPGYGPKSGSTTSGSREVIRESWREVVELREGTARRFPLKTGVGMERFKEAAGTGRDRA

SEQ ID NO: 4806 - DNA, 1914 bp, Myceliophthora thermophilia
atggctacgggatatgaaaagttcgataagcagcttgaccgactggaaaagctgttttccaggaagaagagagccgcatactctcatgactccgctgccacggggattagaccgacgacaccaatgcccttcctgacgaactccaatgcgacgacggcccaggcattcccggtgccaccatatctccgaccgacatcctcccggatgatggctagggaagaggtgctcttgcaacccctctgggcacggcgggctaggagccttccagagtcaccaagcgcacctcgtattaaaaccgcggcatttagcggtcacaatacagacgagaaaggcccctccattccggctcgacactcctcgggctaccctggtatagctcagcgaccttcgtctccctaccccggctcaaacgttgatgacccgtcaacgaagctcttgcagttcagcttctcgacagcctcaagagagtcggaatgcaactcatcgccgcggcgctccagacccagtgtgaggtcgcatcggtccccatcggtttcagtctctccgagggctcgactcgaccggaagcggtgctccactgaattccaacaaccattcccttctcaaggaaatgaacgaggcgttcacggagattcgtctcaatcagagaatccgtctgctttgccgtcgttgcagcgagaagagcgctgttcaggaacggcattgtctgaacattcgtcgccgtccttgtcgccgagtctcccttccaaagacaaacctaagctcgggcggttgaacagcaggcagtgcacagtttcacaccgacaaagtagcctgtcgatctctggcaccactatccggcagcttagtgaagccttgcgcgagtcgaccagtctctctcagctgtcccgtgcgagggatacaaaccccaacccggacccgatactcaaggaacccagcgtcaatgactttctctccttgagcgatgacgatatcgcagacgagcatgctgcctctcgggttcaactatcggtgtctgacccaccgacctttccactgcccccaaatccatcgcctgcctcgtcgcccatccggacgagacctgcttttccgctgctcacgctctctcctccgctggccagtcggcctgccgccgccgccgccatcgaggctgcccgtatcgcggcaaagtacaagtttgaccttgtttacgtcgtcaatctgtggccaagccacatcagccgctccggctgttcctccccttccggtcgatcctgcggcacccctcaccccgcgtctccctccagaactactccattctcaccacctggcagccccgatcctaccacgcctcaccccgcgtctccctccagaactactccattctcaccacctggcagccccgatcctaccacgccaagttccgacagtgatatgacggggcgcctgctcgccgcttacggcttgtcttccatcacgtgtcccttccgcatctctgcaccggttcaccaaaacgtgctccgcagccaagggtggctggaataccgcaacgagacgggcgcccgcgacgagttcgcttgtggctacagctgttccttctacacgggctacagcccggtcagaggccacgggagcgacgccgccagctcagaaggccagtgcaaataccaagagcgccagaaccaggacaagcccgccaaccgcggcatcgttttcgccgcgttccgggttccgcgcgaggacggcagccccgtgttcagcaacgccacagagcttgaggcgctccacaaagacgccgaagctcttgtcgacatgctgatcaatacccgcacggcccgctggcggcgacgtgccccaactacgccgtcgcgctggcgtgtcgcgggcggcagtagccagccgctgaagcctagtgagccaccagttgccatctag

SEQ ID NO: 4807 - protein, 637 aa, Myceliophthora thermophilia
MATGYEKFDKQLDRLEKLFSRKKRAAYSHDSAATGIRPTTPMPFLTNSNATTAQAFPVPPYLRPTSSRMMAREEVLLQPLWARRARSLPESPSAPRIKTAAFSGHNTDEKGPSIPARHSSGYPGIAQRPSSPYPGSNVDDPSTKLLQFSFSTASRESECNSSPRRSRPSVRSHRSPSVSVSPRARLDRKRCSTEFQQPFPSQGNERGVHGDSSQSENPSALPSLQREERCSGTALSEHSSPSLSPSLPSKDKPKLGRLNSRQCTVSHRQSSLSISGTTIRQLSEALRESTSLSQLSRARDTNPNPDPILKEPSVNDFLSLSDDDIADEHAASRVQLSVSDPPTFPLPPNPSPASSPIRTRPAFPLLTLSPPLASRPAAAAAIEAARIAAKYKFDLVYVVNLWPSHISRSGCSSPSGRSCGTPHPASPSRTTPFSPPGSPDPTTPHPASPSRTTPFSPPGSPDPTTPSSDSDMTGRLLAAYGLSSITCPFRISAPVHQNVLRSQGWLEYRNETGARDEFACGYSCSFYTGYSPVRGHGSDAASSEGQCKYQERQNQDKPANRGIVFAAFRVPREDGSPVFSNATELEALHKDAEALVDMLINTRTARWRRRAPTTPSRWRVAGGSSQPLKPSEPPVAI

SEQ ID NO: 4808 - DNA, 1494 bp, Myceliophthora thermophilia
atgcaccatgggcagtcgacgcccggttgctgcttggcgcatggcccggcccggttcaccaagttccagcggctcccccctgagatccggaacatgatctgggagtttgccctgcccgaggcacgagtatacgaggtcctggacgcgcccaacgctaagtggcagaccccgcctcacgaagggctgatgttcgcagatgtacacccggagcctccgccggcaatggcagccgtgtgtcgagagagccggtccatgtttatgcatcactacaaacccctgacattaggaaagacgacaaaatacgtcgacctgtcgcgggatgtcctgctcctggaatcatacctcctcatcaagcggctgcaccggactctgcactttatgagtcagatcccgctagtacgggacagaatcactcggcttgccctgggaacgtcttacggcgtctacccaggcatctaccaccccatgatggatcggaagccatacaggaacaacatgggcaagctgttagcatgtctggccaaatttccgcggctcgaaacgctcatctttgtcatccaccaggaatatcatcttgagtctgcccttcgctttccgggaacgctgaccccaatggccccgatgcctgcgccaacaaacgcggcactatattcggcatacggagttgtgcctgcagcaactcgctgcccgtcaccgcccctgatcaaagacgaaatcaaggccgagtcttcttcccactcaatccccgcatgcccaacaacagcagcagcagcagcagcaattacagaaacctcaccagccggccatcccacgccagctagcagcaccaccagctcacccttgccaccgcctccgctgccgctcccgttggcaccagccctcgaacgacaacctctgtcccctccctcccctccccagcatctacctctccagcggcagcaacacccgcgacgacaccagctgcacgcaactctcgtgcctttttcaaaatctataccgtcatcatcaccagcagcggcagcagtaccatgcgccaagatgggtgctgaagagtttatgtactacaatatgagggggcgctgggacgagtttgacgcgtacgaagcctacgtggaaccagattccccgtcaacttcggcgacgtttgcggatgtggctgagtatcgcgggcgtttgggttttgcggggcggggtcatgatgagcagagtggtagtggtcgtggtgggaagagccctgggaatggtggttgcaagtggggttgcgctggcaacggtgctggcaacctgagggatgagtggcgcgacccgtggccgaccaacaacgactggaagtggttcagacgccggtgggtgcgggcgatgatcgcggcgtgctcgcaggctgcggatgcgggtgctccaagctttggtctggacggcacccagatgcctaggtggaagctgaggggagcgagcctgctctggagatatactcgggacgtcgtagacggttag

SEQ ID NO: 4809 - protein, 497 aa, Myceliophthora thermophilia
MHHGQSTPGCCLAHGPARFTKFQRLPPEIRNMIWEFALPEARVYEVLDAPNAKWQTPPHEGLMFADVHPEPPPAMAAVCRESRSMFMHHYKPLTLGKTTKYVDLSRDVLLLESYLLIKRLHRTLHFMSQIPLVRDRITRLALGTSYGVYPGIYHPMMDRKPYRNNMGKLLACLAKFPRLETLIFVIHQEYHLESALRFPGTLTPMAPMPAPTNAALYSAYGVVPAATRCPSPPLIKDEIKAESSSHSIPACPTTAAAAAAITETSPAGHPTPASSTTSSPLPPPPLPLPLAPALERQPLSPPSPPQHLPLQRQQHPRRHQLHATLVPFSKSIPSSSPAAAAVPCAKMGAEEFMYYNMRGRWDEFDAYEAYVEPDSPSTSATFADVAEYRGRLGFAGRGHDEQSGSGRGGKSPGNGGCKWGCAGNGAGNLRDEWRDPWPTNNDWKWFRRRWVRAMIAACSQAADAGAPSFGLDGTQMPRWKLRGASLLWRYTRDVVDG

SEQ ID NO: 4810 - DNA, 1035 bp, Myceliophthora thermophilia
atgtcgacgaggccgaccctgagggtgtcgacacctctcactgcaaactttcctaatcttccaccgtccgcctcagagcttcgatctgccgtgtcacttccctctgctgcctcggcaaacacacccctgtctgccatctcacgaacgtctgccttccgggaccccatcccttcctctggactgccttcagccggccttccttccgccggacccttcagcgcaaccatcaagatggagcatgacctccaaaagacacccatcacgcctcctgttgcttacctagactttctcaagggcatgtcactagtgtcgccgtgcctcgcctcgccgccgcaaaccggaaagtcccttctcaaccggacaagcacggcgagcaccaccagtaccactagtagccgctcgactgaagcagaggactcggagaaggagaagggcgatcaggttgagagcgcaccatcaaccgcgcggtcagagcttagctgcgagtgtgacgggaaggagaaggagaaggagaaggagaaggagaaggagaaagagaacgacgaagaaaaagagaaggacgaggagaaggctaagggctcgaaaccggcgccaatagacacgaagaagcagccagatcccccacgcggcgggcccgactgcccactgtctgcaccgcccgccggaccaacggtgttccccagcatgaaactacccgcctcccccgccgtctccacatccggcctctactcaccacggtcaccgctcagcgccgcctcattacgctcacctttcgactgggaagcggcgctcaggtccaggagatatgccgaaacgcctggctccaaacgtcccgccgccccggagaccccctctatccctgctggtgctcctggcacacccgggacgccgggacacaccaagcgggagtcgcggactagcgtacgacatatccgggaagtcgtcacccggacggttacctacacgcccagaatggcgccagcgcccaaaggcaagaggagaaagctcgacccagacacggcggtcaagtcttga

SEQ ID NO: 4811 - protein, 344 aa, Myceliophthora thermophilia
MSTRPTLRVSTPLTANFPNLPPSASELRSAVSLPSAASANTPLSAISRTSAFRDPIPSSGLPSAGLPSAGPFSATIKMEHDLQKTPITPPVAYLDFLKGMSLVSPCLASPPQTGKSLLNRTSTASTTSTTSSRSTEAEDSEKEKGDQVESAPSTARSELSCECDGKEKEKEKEKEKEKENDEEKEKDEEKAKGSKPAPIDTKKQPDPPRGGPDCPLSAPPAGPTVFPSMKLPASPAVSTSGLYSPRSPLSAASLRSPFDWEAALRSRRYAETPGSKRPAAPETPSIPAGAPGTPGTPGHTKRESRTSVRHIREVVTRTVTYTPRMAPAPKGKRRKLDPDTAVKS

SEQ ID NO: 4812 - DNA, 210 bp, Myceliophthora thermophilia
atggcatcgtgttcggacaactccgacaagaagcatcacccgggggggatcatgcactttggcccgcgtgaggtggccgtcgagcagaaaaacgccccgatcggccccgtttggaaggccgccaacatgcccctgaaagcgagcgagctgcttaatggcgccaagagcgtcagcatcagcatgtgggctgcccgtggcggcggcaactaa

SEQ ID NO: 4813 - protein, 69 aa, Myceliophthora thermophilia
MASCSDNSDKKHHPGGIMHFGPREVAVEQKNAPIGPVWKAANMPLKASELLNGAKSVSISMWAARGGGN

SEQ ID NO: 4814 - DNA, 1458 bp, Myceliophthora thermophilia
atggaaaccgtttcggaaaccgtttcggaccccgtctacttcgagttgagctggtccatcctcagcactatcggggtcgccaacgtcctctttggcgccttcgtcgtcagcatcaccaacttttccccgatcgccgccgtccccatcgtcacctcgattgccggcgccgtcgcaaatggcctctgctactacgccttttacaggacatcccagcccctcaccaaccaggctgtggcctctgcgtttgccgacatactatggatggtgcaagaagcagggctgtccttctacagttacgtcctcctgagccgcattctctccggcaggccgtggtacatcttcgttgtctcgttctggaccgccatgctgggcatcttgacggtgcgcgttctgatcgccgtcacccgcgtgcgctacatcgccggcggcggccgcgacaacggactccagaacacggtcaaccacctgcatatggcttacttccccctgctcgccctgctcgagtgcctgagcgcctactacctgctcaccacttttgccgaggcaaggagcagctccctccgccgcgccagcggcaccgacctgttccactacctcatgcgaagcaccgagatccgcatggccctcctggccgtcatcggcatcatgcgcgccgtcacctactcgtaccagtccaccgcccagagcgccaccaacgtcgccggccagatcgaccgctttgcctacaccatggagtgcatttttcccatcatgatgtacatcgacatgctctcgaccaaggtcgtgcacggccggagccacgcctatgacatttccctgcacagccagaacgacccgacccagaatcgcacccggacccgggcccgggcccgaccacggatctggaaccgagccaaacaggggaaggagacccggatcccgcggacgcggcgcttcgtcacgagcaccaagcacaacaccaccactaccaccaacaacgcagacgacgatgccggtcgtggcggcagcggcggtagcggtgcggatcagatcttcgtcggggcccagcccgaccacgagcaggctatcgagatcacaggcggcagatcctcgtcctcgccgtcgccgtcggcgtccccgtccccatggggccggaggagtgcgacgggctcgcgggagcgcatcgtcgatcgccaccgccgtggaggcagcggtgacgacggcggcggcggcggcaggaacggcagccgcgcctcgctggacggccagggcggtgccggtggtggcggtggtctggcgccgccctcctggggtgtcgggctcgagccggctattattaccccgagatcgaacccggacaacccgagcccggactcgaaccggccggagggcggcgggatccagaggacggtcgagtttggcatccggttcagccacccaagactgggggacgagtccgccattggtgggggcggatga

SEQ ID NO: 4815 - protein, 485 aa, Myceliophthora thermophilia
METVSETVSDPVYFELSWSILSTIGVANVLFGAFVVSITNFSPIAAVPIVTSIAGAVANGLCYYAFYRTSQPLTNQAVASAFADILWMVQEAGLSFYSYVLLSRILSGRPWYIFVVSFWTAMLGILTVRVLIAVTRVRYIAGGGRDNGLQNTVNHLHMAYFPLLALLECLSAYYLLTTFAEARSSSLRRASGTDLFHYLMRSTEIRMALLAVIGIMRAVTYSYQSTAQSATNVAGQIDRFAYTMECIFPIMMYIDMLSTKVVHGRSHAYDISLHSQNDPTQNRTRTRARARPRIWNRAKQGKETRIPRTRRFVTSTKHNTTTTTNNADDDAGRGGSGGSGADQIFVGAQPDHEQAIEITGGRSSSSPSPSASPSPWGRRSATGSRERIVDRHRRGGSGDDGGGGGRNGSRASLDGQGGAGGGGGLAPPSWGVGLEPAIITPRSNPDNPSPDSNRPEGGGIQRTVEFGIRFSHPRLGDESAIGGGG

SEQ ID NO: 4816 - DNA, 1893 bp, Myceliophthora thermophilia
atgtcctcctcctctcaacagcaaccgccctcccagggtctcgttctcggctactccagccagcaccccttctcgtccgtccggctctcggaccgggcctcggtccaggccctcctcgccaccctcctggacccgctcgagcccttcttctccccgggcaaggcgcgggtgcggtgcccgggcgcgaccgccgtgcgcttcgaccagacggcctccgaggtcgaggggttcgcgcgcccgctctgggggctggcctgcctgctggccggcggcggcacctaccgcggcacccagtggtggatcgacggcctccgggccggcaccgacccggaccgcccgggcgagtactggggctacccggccgacaacgaccagcgcatggtcgagatgtgccccatcggcttcgccctcgccgtcgcgccccagatctggcagggcctgagcgagcgcgagaaggccaacgtggaggcctggttgggcaacagcatcaatgagaagaatatgccaaacaccaattggctgtggttccgcgtgtttgcgaatctcgggctgaaaaagaacgggggcaagttctcccaggagaggctggaagccgatatcaagcatctcgacaccttttaccgtggtgacggctggtcgaacgacgggcccgaggggatccatcagatggactactactcgtccagctttgccatccacttcctccagctgctctacgccaagctggccggcgaggaagatccacagaatgcagccgagttcaggaggcgagctcagattgcggcgcttgacctggcgcactactatgatgaacaaggacgagccatccccttcggccgcagcgtcggctaccgcttcgccatggtctctttctggggcgccctcgcatacgccgacgtggaactgccagcccctctgacctggggcatggtcaagggcatcgtcatgcgccatctgaggtggtggcagacccagcacaacatctggacctccagcggcacgctgaccattgggtactcatacccaaacatgtatatggccgagaactacaacagtcccggtagcccgtactgggcctgcctggccttcatctgcctcgccgtgcccgagacacaccccttctggacgtccaaggaagagaatcactgggacgtgattcccaggatcaaggcactcaagcacccagggcacatcatgagcaacctgggcgggcactgcatgctgctctcctccggccaggcgtgctcgtacccgatgaagggcacgcacgccaagtacggcgcgttcgcctactcgtcggcgtttggctactcggtgccgccgggcctcttcacgctcgagcagtacgcgctcgcgtcgcagctcggcctctcggacgacgggggcgagtactggaagacgcggcgggtgtcggactcgtcgctgcagacgcgcgcgggcgagcagcagcagcccgagcccgtgctcgtctcgctctggtcgcccttcgccgacgtgcacgtcaggacgtacctgatcccgccgcgcgccgagacgcccaactggcacctgcgcgcccaccacatccgcgccgaggggcgcgacgcctgggccgacggcgcagagggcgccttcgccgtctccaagggcgccgtcggcgtccgcgccctcgagggccccgccggccgcaggaccgccaccctggtcaacgccgaccccaactccaacctcgtcgagagccggacgaccatcccgacgctgcaggggaccgtccgcaagggcgagagcgtctggtacgtgacggccgtgtacgcgaagcccgccggcgagggggtcaaaaaggaggagtacctgagcggctgggacaaggtacccgaggtgccggcgtggttgaaggaggagatagggctgtga

SEQ ID NO: 4817 - protein, 630 aa, Myceliophthora thermophilia
MSSSSQQQPPSQGLVLGYSSQHPFSSVRLSDRASVQALLATLLDPLEPFFSPGKARVRCPGATAVRFDQTASEVEGFARPLWGLACLLAGGGTYRGTQWWIDGLRAGTDPDRPGEYWGYPADNDQRMVEMCPIGFALAVAPQIWQGLSEREKANVEAWLGNSINEKNMPNTNWLWFRVFANLGLKKNGGKFSQERLEADIKHLDTFYRGDGWSNDGPEGIHQMDYYSSSFAIHFLQLLYAKLAGEEDPQNAAEFRRRAQIAALDLAHYYDEQGRAIPFGRSVGYRFAMVSFWGALAYADVELPAPLTWGMVKGIVMRHLRWWQTQHNIWTSSGTLTIGYSYPNMYMAENYNSPGSPYWACLAFICLAVPETHPFWTSKEENHWDVIPRIKALKHPGHIMSNLGGHCMLLSSGQACSYPMKGTHAKYGAFAYSSAFGYSVPPGLFTLEQYALASQLGLSDDGGEYWKTRRVSDSSLQTRAGEQQQPEPVLVSLWSPFADVHVRTYLIPPRAETPNWHLRAHHIRAEGRDAWADGAEGAFAVSKGAVGVRALEGPAGRRTATLVNADPNSNLVESRTTIPTLQGTVRKGESVWYVTAVYAKPAGEGVKKEEYLSGWDKVPEVPAWLKEEIGL

SEQ ID NO: 4818 - DNA, 561 bp, Myceliophthora thermophilia
atgcagcacgcccggcaaccggccattttccacacgtcacaacatgtcgagactccccaagaaccccataacccaaaaacgtcgtcctcccctccgtcctcgtcgccgtggcccacactcgagtccaagcagccgcccagagagggctcaaatcgccggcttcaaaaggccaaggtactcattcttcgcagcgccgaacgacaccttccgctaattgttgcaggaacacgaccgcagggcatccagtcgcgcaaaggcgcaaccaagcgtgccgagtccaattatatatgcccgtctacgatcagggagacgtcgtcgacaggtatgccatcaatcctttacattgtacggagtagtgatttacgagctaaggagggtcaacaggatccacctgcgctacagaacagaggtcgcaagcgcaagcaaccgatcgaaaacgcagtcgagcccagggtagacgggtatgtcaacacgagaaaagtacagtttcgtctgcagggcctgtcattatcgatggtacagttttgttttacttccaattcaaatcagcagcccaggtag

SEQ ID NO: 4819 - protein, 186 aa, Myceliophthora thermophilia
MQHARQPAIFHTSQHVETPQEPHNPKTSSSPPSSSPWPTLESKQPPREGSNRRLQKAKVLILRSAERHLPLIVAGTRPQGIQSRKGATKRAESNYICPSTIRETSSTGMPSILYIVRSSDLRAKEGQQDPPALQNRGRKRKQPIENAVEPRVDGYVNTRKVQFRLQGLSLSMVQFCFTSNSNQQPR

SEQ ID NO: 4820 - DNA, 1062 bp, Myceliophthora thermophilia
atgccgcatccatacatgaccccgacgacccgacattttgggcgggccaccaccgagacactgccgggacctgacaacgtcgggccgtacctgctccgcgtcatttgggctttggcaggactctcgactctcttcttgggcctgcgcgtatactgcaagctctcgcggcgccgtcggttgtggtgggacgacaacttcctcattgccggctggatcgccctcatctacgccatctcgctcctgacggtcgccgttcaccatgggctaggcaggcattacgaagacttgagcgaagaggccatcgccagcatgggcatgttctcgatggccggcgggttcggcaacatcctggccacctgctggactaagacgtccttcgccatcacgctgctgcgcatctcggagggcgggatgcgccgcaccatctggttcatcatcatcagcgtcaacctggtgctcggctccaacggggtcatccactggatccagtgctggccggtccagaagacctggcgttcttacctggagggctcctgcttcacgcccgacattgtccggaactacaatactgccgttgccgttttctcgggcgtgatggatatcgtcctcgctctccttccgtggaagatcatctggtccaatacgatcaacagacgggagaggctgggtgcgctggtggccatgagtgccggtatcatcgacggcgtcatggccttcctgaagatccagaccatgtatgtcatcggaaacgccaacacgaccaccgtagatctgcagatctttggcaccgccgagccagccaccgccatcatggccgcctccatcccgatgctgcgcgtcctcatccaacgcgacgacagctcgaagccctcacagccggaattcgtgcagctcaggacgacctcgtcgacggcgcgaggaaccgatctcctgtcgaacgataccgacaagaaaaggtcgaccgggagttcgtggccggggcttgatgtccaagctgtggaagaggtccacgttcgccagggcgatgaaaaggataaaaaaagtattgggttggctgtgtaa

SEQ ID NO: 4821 - protein, 353 aa, Myceliophthora thermophilia
MPHPYMTPTTRHFGRATTETLPGPDNVGPYLLRVIWALAGLSTLFLGLRVYCKLSRRRRLWWDDNFLIAGWIALIYAISLLTVAVHHGLGRHYEDLSEEAIASMGMFSMAGGFGNILATCWTKTSFAITLLRISEGGMRRTIWFIIISVNLVLGSNGVIHWIQCWPVQKTWRSYLEGSCFTPDIVRNYNTAVAVFSGVMDIVLALLPWKIIWSNTINRRERLGALVAMSAGIIDGVMAFLKIQTMYVIGNANTTTVDLQIFGTAEPATAIMAASIPMLRVLIQRDDSSKPSQPEFVQLRTTSSTARGTDLLSNDTDKKRSTGSSWPGLDVQAVEEVHVRQGDEKDKKSIGLAV

SEQ ID NO: 4822 - DNA, 1356 bp, Myceliophthora thermophilia
atgtcggcctactatcctctacctcccggagctggcggcgctgcccctggaggccaacaaagctaccctccccctcccatgtcggcaccacccacgcagacgcacttttcgtatccccctcccccaggcaacgggcagggctcggtcaattacccccctccgcctcaagccggcccagctcccactccgccgtcagggacgtcctcaccttcagacccgcctcccccaacgccgcagcagcagcaacagcaacaacattatccgccccctcctcagcaacaacagcagcagcagcaatatagccccccgcctccccagcagcagcagcagtatcctcccccgccgcagcagcagcaacagcagcagtatgcgccctcgccccaggcgtcgccctctcccatgcagcacggtgctttgccccagcacttgcggactccctccaccgtgtcgcaaggttcgccgaaccagccgcaatttgcgccacctccttcataccctgtgcaggatgacaaaggcacctatccgcccgagaagacccagcacctgcagcagccacagccgcagctgcaaccgcaattgcaaccgcaatttcaaccgcaactgcagccccaggtccccatcatcgatccgaccggtactcctgccgccggccacttcgtcggcgccagtacgatagtcgacgacgtgggcaccttcaacggaggcagctaccgcattagccaccgcgactgcaactcaatcctgaccatccagctggccatcggatgccccatcgaagcgaggccaggcgccatgatcgccatgtctccctccatcgttctcaagggcagcgtcaagttcagcgtgaagaaactcgtggccggcggcgacatgggcagctccacctacacgggacccggcgagctgctgctggggccgcccatgctgggcgacatcaccagcctgcgactgacgggtcaggagtcgtggtcggtcagccacgacggcttcctcgcgtgcacgcaaaacgtcgtcaaggactacaaacgccaaggcctgggcaaggccatgtttagcggcgagggcttgtgggtgtacaagatctcgggcacggggctgctctggttgacgagcttcggcgccattatccgcaaggatctcgtggaaggcgagaagtacatcgtggacaacgggcacctcgtcgcctggaacaccaaatacgtcctagagcgcgtcgcctcgggcggcatcatctccggcctggcttccggtgagggcctggtgtgcaagttcaccggccccggcaccgtctttattcagaccaggaacgctaaatccttcacggcctacatggggggccagcaggtaaatgcttaa

SEQ ID NO: 4823 - protein, 451 aa, Myceliophthora thermophilia
MSAYYPLPPGAGGAAPGGQQSYPPPPMSAPPTQTHFSYPPPPGNGQGSVNYPPPPQAGPAPTPPSGTSSPSDPPPPTPQQQQQQQHYPPPPQQQQQQQQYSPPPPQQQQQYPPPPQQQQQQQYAPSPQASPSPMQHGALPQHLRTPSTVSQGSPNQPQFAPPPSYPVQDDKGTYPPEKTQHLQQPQPQLQPQLQPQFQPQLQPQVPIIDPTGTPAAGHFVGASTIVDDVGTFNGGSYRISHRDCNSILTIQLAIGCPIEARPGAMIAMSPSIVLKGSVKFSVKKLVAGGDMGSSTYTGPGELLLGPPMLGDITSLRLTGQESWSVSHDGFLACTQNVVKDYKRQGLGKAMFSGEGLWVYKISGTGLLWLTSFGAIIRKDLVEGEKYIVDNGHLVAWNTKYVLERVASGGIISGLASGEGLVCKFTGPGTVFIQTRNAKSFTAYMGGQQVNA

SEQ ID NO: 4824 - DNA, 2592 bp, Myceliophthora thermophilia
atggctcccaacgtcaacaaaccctcagacacaaaagagaaggaggccgatgtaaaccgcaaactccagatctacggcatcatcagcgcctttcagctcggcaaggttccctcgaacgaccagatcgatgtcgccctaaacagcttcctggagtccaaggcgctctcaaggccctccaagaagctctctcccgaggggcagcgactggtggaagatgtcaaggaagtggtcacgcaggccaagcatctgctcctgtccaagaatgatggcaacctgctgcaggactttatctggcagacccagcaatttgaccccaatgccgtgtcgacacccggagctcccgtcagtaaggaacaggcacggcaacacggcaaccaggcgctcgagggtctgcgcactctgggcaccctgattatcacaaacgggcagttccggaagcttctttctgatgcgaccatcctcctccgcgacattgctggcgacgccgccacgaatgctgcagcccgcgtcagacccagccaggaagacctcgagcaaatcgaccgtcccgctcaggacaacacctggcacgatgctcccgacatgtccaagaacagcgtgaagggtaagctccagaattactacaagggcaatcccaaggaggacgctagggctgccatctccgaggccacatccgaagcccacccttccggttcctcggatccgagagacctcgcaaacaccgcagcacatgatggccagacctgcgcctcttcaggggtcaacgcgactgggggcgcggcggccgccaaggacgccctgaagcgcaacgtcgataaaaacgttgacgaggaaaccaaggaaaaggcccgcgccaggcgtgatgagtaccgtgagcgtgcaaggaactacttctctcgcaagatgccgcaggagcgtcgcgagcagaccatttggcgtctcaaggcatgtcgcgaacctcacctctttttcttgccggacactgggctaacttgcgctgctgcagaaaatgatactcgaacgctgctggatcttgccgaggagtacggcgaccacgccaaccggcttgccaggggtggttcggataccgtcaaggaggcccgctctggcctggtccaggccgaaaccgacctaaagacgttggttgagcgttttgcaaatggcacctctaccgacgacctgtgggactccattaagaccatctacagcgacgcggaccgcgatccccagttgaagaactggttcaagtcgctgaaccagtacattcgcagatgtctgcaggagcagggatacatcctggacgacgactccaacgcgcagtggaaccgcctgcatgatgagggcaactacctgttgcgggacaagtaccgcagccacgctgaccgcgtcgtggatgagatcaagttcctggccgaccagttcgatcatgacccgcaaaacaaggcctttgctgcctccatgaccaagctgttcaccgacctgggcaacgacgagaacgggaggccagccttcaagccccatctcgtcaaggatctcaccgacgtgatcattcccgccattcttcagaatatcgcctacattccggtgccccggatcgagtactcagaaccccggttcgacgccgttattgagaacctcgtcctcgagagcgacaacttcatgcccaacgtgctggaggtcgccagcgagaactacatgcgcttcggccggaagaagattgccagcagcagcaagcactcggtcgacgtcaaggtgacgggcatccagatggacctcagagatgtcagctactacatcaagcgcaagcaaggcttcccttctatcacggacaagggcgtcgcgaactttttgttggccggggacggcttcaccttccggatgaagttcttgtcaccagacaagagcgaccggaaatccttcttcaaggtcgataaggtggacgtttccgtcaacaacctcgacatcaagctcgtcgagtcgaaccacaagatactttttggtctcttcaagccactgatgctcatggtgctccgtcccggcgtgcagaaggcgctggagaaggcgatcaaggaccaggccgccaagctggacgccatgctgttccagatcaagcaggaggctgaccgggcgctcgagcaagcccgtgagagccccgagcaggcgcccaacatctacaaccgttacgtgacggccgcgcagaagaaggtgcttcagggcaagcggaaagcgcaggagacggcggccgacaagaaggtcaattacgccatcaccaaggaggacagcatcttccccaacatccacctgccgggcggtatcagctccaaggcgaccgagtaccgggagctcgcccgcaagggtgacaagtgggaaagccccgtcttctccatcggctccgccggcaagagtcgcgacatccccgccccgccgaccgtcgtccgaaagctgcacaagaccgcaacgccgggcaacgtgcacggtgggtacggcgggggtgctcccaacgggaataccctgaagggcaaccacgacctcgatggaggcttgaaggcccattcgcccgcctttgatccgacaatggcagctgcttattag

SEQ ID NO: 4825 - protein, 863 aa, Myceliophthora thermophilia
MAPNVNKPSDTKEKEADVNRKLQIYGIISAFQLGKVPSNDQIDVALNSFLESKALSRPSKKLSPEGQRLVEDVKEVVTQAKHLLLSKNDGNLLQDFIWQTQQFDPNAVSTPGAPVSKEQARQHGNQALEGLRTLGTLIITNGQFRKLLSDATILLRDIAGDAATNAAARVRPSQEDLEQIDRPAQDNTWHDAPDMSKNSVKGKLQNYYKGNPKEDARAAISEATSEAHPSGSSDPRDLANTAAHDGQTCASSGVNATGGAAAAKDALKRNVDKNVDEETKEKARARRDEYRERARNYFSRKMPQERREQTIWRLKACREPHLFFLPDTGLTCAAAENDTRTLLDLAEEYGDHANRLARGGSDTVKEARSGLVQAETDLKTLVERFANGTSTDDLWDSIKTIYSDADRDPQLKNWFKSLNQYIRRCLQEQGYILDDDSNAQWNRLHDEGNYLLRDKYRSHADRVVDEIKFLADQFDHDPQNKAFAASMTKLFTDLGNDENGRPAFKPHLVKDLTDVIIPAILQNIAYIPVPRIEYSEPRFDAVIENLVLESDNFMPNVLEVASENYMRFGRKKIASSSKHSVDVKVTGIQMDLRDVSYYIKRKQGFPSITDKGVANFLLAGDGFTFRMKFLSPDKSDRKSFFKVDKVDVSVNNLDIKLVESNHKILFGLFKPLMLMVLRPGVQKALEKAIKDQAAKLDAMLFQIKQEADRALEQARESPEQAPNIYNRYVTAAQKKVLQGKRKAQETAADKKVNYAITKEDSIFPNIHLPGGISSKATEYRELARKGDKWESPVFSIGSAGKSRDIPAPPTVVRKLHKTATPGNVHGGYGGGAPNGNTLKGNHDLDGGLKAHSPAFDPTMAAAY

SEQ ID NO: 4826 - DNA, 1065 bp, Myceliophthora thermophilia
atgggctgggtcgagaacgcaacgccggagatcaacgccaaatctgaatggccaaaaatcatcgcgatatgcgtcgtcctttcggtcttttccatagccactgtgtgtgcccgggtttggattaggttcaagaatcatgggttggcggccgacgactacatggcgatgctgtcgatggtgttcgcattagcatatgcgattctgtgcatcgtccaaaccaagtacggcctcggtcttccgctcgccttgcgccctaaggagagcctcattccgtacacccgcaccaactacgccggccgacccatctaccagatgggcatcagcttcttcaaggttgcgctgctgatcagctacctgcggctcttcaaggggacaaaccatgtcatttaccgcagggtcgtctggatcaccatggccgccatcttggccggacacttcggttgttcgctaaccctcatctttgcgtgccgtccggtacacaagtcctgggacccgtttgtggaaggcaaatgcctggcacctggcccctcgtttaccgcttatgccatcgtgaccattgtgtccgacgtcgtggtcgccatcatcccgattcccgtgctgctcaagctcaaggtccacaccgccaagaagatcggccttattatcatcttcctcctgggtctcttcacgactctgtgctccatcttccggtaccaacagattaaccgcattcaaagtggtgatggcaactcgacaatgctcgttgtgtggggtgttgttgagttcaatgtcggaaacatggtatcgtcgctgccattcctcgcgccgatctttttgcgcaaagcccgggagtacacgaccaagtactcgggaagcggaaacaactacggcagcggggcgcaccgtatcggcaaggtcagcgacgtctacaagctcagcagcgtgtcgagccagcgaaagggcaccttcgccaccgcccaagggcagaacgccggcagtgaagaaaacattctcgaggcgagcaccgaaggcgcccccgagaacaccatcatgaagtcggttacgtatagcgtgcgtgtcgaatga

SEQ ID NO: 4827 - protein, 354 aa, Myceliophthora thermophilia
MGWVENATPEINAKSEWPKIIAICVVLSVFSIATVCARVWIRFKNHGLAADDYMAMLSMVFALAYAILCIVQTKYGLGLPLALRPKESLIPYTRTNYAGRPIYQMGISFFKVALLISYLRLFKGTNHVIYRRVVWITMAAILAGHFGCSLTLIFACRPVHKSWDPFVEGKCLAPGPSFTAYAIVTIVSDVVVAIIPIPVLLKLKVHTAKKIGLIIIFLLGLFTTLCSIFRYQQINRIQSGDGNSTMLVVWGVVEFNVGNMVSSLPFLAPIFLRKAREYTTKYSGSGNNYGSGAHRIGKVSDVYKLSSVSSQRKGTFATAQGQNAGSEENILEASTEGAPENTIMKSVTYSVRVE

SEQ ID NO: 4828 - DNA, 972 bp, Myceliophthora thermophilia
atgtcgtcagattacgttgaggtgcgagtcgccttgcagcgcagagtgcgacgccgacggccgtggctggaagcagcacagacacctttccgcgacgacgcgccgatggttgggccgcccaagacgactgccgcagacttcgagatgccccggctgcgccgctgccctttcgacctggacagcatggtttgggaagcccgtatgggcggcggattagatggctatgtttggaaggtccgcttcgggacccaaggacctttcgtactgaaggtgttctgggatgcccagcccgtcgactttccaacttactacgccccgcagcgagaatgccagaatgccgctctcctccagatgatgcaaaccgcagtggagcaggcggctgcagcctctcgtccaatcttggtcaaccccaagccgacaacttgggacgacgcgatcgccaacctcgccgccttttccgacgaggcacgtctgaaacagccgtcaccggccgatcagggctctgggcccccccaagaaggcttctgccagatatcgaccatgccacgcgtgaagaaatgctacggctggctgacaatccccggtacgatattccgggaactgcactggacactccggccgcccccagttcaggttgacaggatcaaacgttacctcacgcctgaccaggaatacatcgcaattgtctacgagtacgtcgaggaaggcgaaaacgaccccgagacgatgcagaaagcgatggactttttttggcttgccggcttcagctgtgccttctcacccctcttaaggaactggaaaagcggagtgctcgtggatctgtccgatatcgttccaccccgcggatatggatggcaagagaaactctacaaagatgggccagagtcggcacatgtcctgctaaaacagcctctgccggcgggacccagcttccactgctccaacttcacccgcaagctgcattacccatga

SEQ ID NO: 4829 - protein, 323 aa, Myceliophthora thermophilia
MSSDYVEVRVALQRRVRRRRPWLEAAQTPFRDDAPMVGPPKTTAADFEMPRLRRCPFDLDSMVWEARMGGGLDGYVWKVRFGTQGPFVLKVFWDAQPVDFPTYYAPQRECQNAALLQMMQTAVEQAAAASRPILVNPKPTTWDDAIANLAAFSDEARLKQPSPADQGSGPPQEGFCQISTMPRVKKCYGWLTIPGTIFRELHWTLRPPPVQVDRIKRYLTPDQEYIAIVYEYVEEGENDPETMQKAMDFFWLAGFSCAFSPLLRNWKSGVLVDLSDIVPPRGYGWQEKLYKDGPESAHVLLKQPLPAGPSFHCSNFTRKLHYP

SEQ ID NO: 4830 - DNA, 423 bp, Myceliophthora thermophilia
atggcggacatagacaccttccccctcgcagcagatggcagcgatgggtctgacggggcattcgacggcagtgacgccggggcggcgggcccttctaccggcggcgtggtcctctcccgtggcgccctaatcgccatcatcgtcgtcgttgtcatggtcgccatcctaggcatcgccacctcagtcctcttctttatcgccaagaagcgcgagtggacagtccgagaaacaatacggagatcggcaagaaaagtcgtcaccgtcatgacgccgggacggaccgagttccccaaatcagtcaaggaagggcacagcaggttggctgatgtgccgccgacgcccaagatcacgcccgagcacctcgacttagaaaagggcctggaacaaccgaagaggaagcgagcaaatttcagtcgcaagtga

SEQ ID NO: 4831 - protein, 140 aa, Myceliophthora thermophilia
MADIDTFPLAADGSDGSDGAFDGSDAGAAGPSTGGVVLSRGALIAIIVVVVMVAILGIATSVLFFIAKKREWTVRETIRRSARKVVTVMTPGRTEFPKSVKEGHSRLADVPPTPKITPEHLDLEKGLEQPKRKRANFSRK

SEQ ID NO: 4832 - DNA, 462 bp, Myceliophthora thermophilia
atgttgacctcccgagttcttttttcccacagctcggctcgttttcgcggccaccagttacaccaacttcaagagcatgtccagcggacccaagagaaagtagaaaacaacccaattctctgggaaaagcaatcagcaccgatgcgccaagcccacgtggcgcacagtacagtccaagtcaccaacttacactttcgcttcgggcttcggcggagagctcgacttcctaaagttcctccgccacattgtcatacaactttgcatgccggcatcctcttcgacccgatcctcccgcgctcggtgatcggtcacatcggagctcgggggctcgttctgaacgacaccacaggacgcagtccgcaaacagacaagctccgcgggagatgtggaagcgcgaggccttggaaagccgtccttctttccgtcattttgcttgcgtcggtgacgcatatcttggggtag

SEQ ID NO: 4833 - protein, 153 aa, Myceliophthora thermophilia
MLTSRVLFSHSSARFRGHQLHQLQEHVQRTQEKVENNPILWEKQSAPMRQAHVAHSTVQVTNLHFRFGLRRRARLPKVPPPHCHTTLHAGILFDPILPRSVIGHIGARGLVLNDTTGRSPQTDKLRGRCGSARPWKAVLLSVILLASVTHILG

SEQ ID NO: 4834 - DNA, 510 bp, Myceliophthora thermophilia
atggcagctgggcaagcatcgactaaagggagcaccaagaccagggtaccagagcgcaagccccgcaaatccagtgcaagtcgcggcgacgcgatcatacacaccgccgatgctgccgttgatgccaccgattcgcccgagcccccagattctccggtcccggaagatgacgacaggcagacaccaagtccgcggctgcagcacgcgcgcaggcgacagaaccgcgtcggaaagaggtaccgcgacaagctcactgcttgtttcgagaccttgcaggcaacacttggcgtcgacgaggttgaggcgcgtgtggatggttccatcgatggaaaacagcacgggatatcagaggggcggcgaggtaaaacccgagcacggcgccggcctctcaacaaggcagaagtcctcgatctaacgtgcgagcgcgtcaaaaccctgctgcaggagtgggaggcagtgaaagctgcgagagaggcaatgcagacgcagagggaggcagaaggatggtaa

SEQ ID NO: 4835 - protein, 169 aa, Myceliophthora thermophilia
MAAGQASTKGSTKTRVPERKPRKSSASRGDAIIHTADAAVDATDSPEPPDSPVPEDDDRQTPSPRLQHARRRQNRVGKRYRDKLTACFETLQATLGVDEVEARVDGSIDGKQHGISEGRRGKTRARRRPLNKAEVLDLTCERVKTLLQEWEAVKAAREAMQTQREAEGW

SEQ ID NO: 4836 - DNA, 1122 bp, Myceliophthora thermophilia
atgttcaacttcggcaagggatcgactattatataccgtgctctccgttacctgttttccactgccccggatgattgcgtattatcatacggaaatgacaacccccctttttccgtcaacgaagcccacttgggcggcgtcccgactccgattcccgacacgcccctgaccatcatcttcctcgtcctttttaccctcgccctcgtcctctccatcaccttctaccagctcgaccgcacccgcctccgtcccgacgactactccgacgacggccccgacgacgaccccgacgaccaccgccactcctccctcttccgccggctggtgccccctcctctcctccccgccctacgcgccggattcatcctcacccggctggccgcgctggccacccggctcgtgtggacctaccacccggggacgcgcgacctcgagatggcgtcgaccatcctggcgcccgcgggcaccgtgctgccgctgatcgccaacgtgctgctggcccgccgcttcctgcgcgactacgccgtcttcggcccgcacccggccgtcgtgcgctccgcccgcgccgccgtcttctgcgccgtcgccgccctcgtcatggccgtcagcgcccacgccgactcgtacttcacccgcgagcccgaggagctcgaccgcggccgctccgtctggctcgccgccgagtgcatccgcctcgccgtcgccgtgctggccccgctggccgtcctcgccggcggctggggcttgccggcccgggaggaggtcgagcgggacaagccccggtttgcggggcgggcggccatgatctgcggggttggggtgctcctgacgctgcagcaggggctcaggacgggtgtcgcgttcgaggggaggggtccggagagccaagcgtggttcctgcacaaagcggcgtactactgcttcgtggacctgatcgacctggccatcgtgtgctggttcttggtcgcgagaatggatccacggttcagggtgagacgcccgactgcgctcatgaaggataaagagtcgccggatggtgcgggaacgatggtgccggcgtggtccgagagctggcgggatcgcgtgaataccgagatggaggtctttgggaacagtggatga

SEQ ID NO: 4837 - protein, 373 aa, Myceliophthora thermophilia
MFNFGKGSTIIYRALRYLFSTAPDDCVLSYGNDNPPFSVNEAHLGGVPTPIPDTPLTIIFLVLFTLALVLSITFYQLDRTRLRPDDYSDDGPDDDPDDHRHSSLFRRLVPPPLLPALRAGFILTRLAALATRLVWTYHPGTRDLEMASTILAPAGTVLPLIANVLLARRFLRDYAVFGPHPAVVRSARAAVFCAVAALVMAVSAHADSYFTREPEELDRGRSVWLAAECIRLAVAVLAPLAVLAGGWGLPAREEVERDKPRFAGRAAMICGVGVLLTLQQGLRTGVAFEGRGPESQAWFLHKAAYYCFVDLIDLAIVCWFLVARMDPRFRVRRPTALMKDKESPDGAGTMVPAWSESWRDRVNTEMEVFGNSG

SEQ ID NO: 4838 - DNA, 1632 bp, Myceliophthora thermophilia
atggctagagaccggtcgggagacccctcggggggcgacgagatcacgccggccccggaacccgccggcgttcggcgaaaggagctgcgcgacaaggcgaccgacttcctcgccagccacggcgccggagacagttccttcacgtacgaggaggagcgccgcgtcctttgccggatcgacttccgcatcctcccgctcctcctgggcgcctatttcttccagcagctcgacaagagctcgctgagctacgtctccgtctttggcatctcgcgtgacgcccacctcgtcggcaagcagtactcatggctcgggtcgatcctctacctggcgcagctggtcatgcagcccctggccgcgttcctgctcgtcaagctgccgacgggcaaggtgatcgggagcgccatcctgctctggggctcggcgctggccatcatgtcggcctgcaccgacttccgctccctgctggggctgcgcttcctgctgggcgccttcgaggccatgatcgcgcccagctgcgtcgccgtgacgcagatgtggtggcgccgcggcgagcagacgatgcgcaccagctactggaacgccatgaacggcatcaccgccatcgtcggcagcctcttcacctacggcctcggccacatcgagagccgcgtcctcttcaagtaccagatcatcttcctcttctgcggtctcctcaccgtctgctacgccctagtcgtcctcctcctcatgcccgactcccccatggaggcaaagtacctcgccgagagggagaaggtcatcgccgtcgagcgcgtgcgcgctaaccagatgggcgtcgcctcccgtgcctggcgatgggaccacgtctgggagaccctgtgggacttgaagacctggtgctggttcatcgccatcgtctccatctcgattgccagcggcggcatctcgacgtttggcagcctcatcgtcaaggactttggctacaccaactttgacgccatcctcttcaacatccccttcggcgccatccagttcttcgtcatcatcggctccggctgggccgccacgcactggcagaggaagggtttgaccatcgccgccgtcagcgtcttgcccctggtcggcaccatcctcatgctcaccgtcccgcggaacgaccacaataagggcgtcttgctgtttggctattatctggtgtcctgcctggccgccatcacgcccctgatctacgcgtggcaggcccagaacacgggcggggacacgaagaagaaatgcacttcggccgtcgtcttcatcggcatgtgcaccggcaacgtgatcgggccgctgctctacgacgagagccaggcgcctctgtaccgcccggggctcatctccaatctcgtcatgtttgcccttgtcggcagtatctctgcacttatccccttctacctaatgttcctcaaccgccggcacgccaagcgccgtgagcagctcggcaagaacgccgtgctcgtggatgaatccatgatagccaagatccaaataatagaggacagcaaggcggtcgaggtggaggatgccaacaacaggcggcaaagggcgctcgaggaagacaatgcgctacgggacatgacggacttgcagaacgaggatttcatctatgtctactga

SEQ ID NO: 4839 - protein, 543 aa, Myceliophthora thermophilia
MARDRSGDPSGGDEITPAPEPAGVRRKELRDKATDFLASHGAGDSSFTYEEERRVLCRIDFRILPLLLGAYFFQQLDKSSLSYVSVFGISRDAHLVGKQYSWLGSILYLAQLVMQPLAAFLLVKLPTGKVIGSAILLWGSALAIMSACTDFRSLLGLRFLLGAFEAMIAPSCVAVTQMWWRRGEQTMRTSYWNAMNGITAIVGSLFTYGLGHIESRVLFKYQIIFLFCGLLTVCYALVVLLLMPDSPMEAKYLAEREKVIAVERVRANQMGVASRAWRWDHVWETLWDLKTWCWFIAIVSISIASGGISTFGSLIVKDFGYTNFDAILFNIPFGAIQFFVIIGSGWAATHWQRKGLTIAAVSVLPLVGTILMLTVPRNDHNKGVLLFGYYLVSCLAAITPLIYAWQAQNTGGDTKKKCTSAVVFIGMCTGNVIGPLLYDESQAPLYRPGLISNLVMFALVGSISALIPFYLMFLNRRHAKRREQLGKNAVLVDESMIAKIQIIEDSKAVEVEDANNRRQRALEEDNALRDMTDLQNEDFIYVY

SEQ ID NO: 4840 - DNA, 1068 bp, Myceliophthora thermophilia
atggcggccgaagcgtccgtgatcggcagagaacgtcacgtcccgccgcctggcgaggatgggcgctacaccatatctgcggagggtatcaaggcgcagttcatcccgtacggcgccaccctgaccaacttgttcgtcaaggacaagaacggcgaggacattgacgtggtgctcggctacgacgatgtcaactattaccccgaggaccccggccacccggtgtacaatgccattcccggccggtacgccaaccggatcggcaacgggaagtacactctcgacgggaagacgtacttcaccgagaagaacgacggcaacaacacgctgcacagcggcaccaacaactggtcgtaccgcgtgtgggacgtgaccgacgtcaagcaggactccatcaccttctcgatcctggacaaggccaattcgtcccagggcttcccgggcgacgttaaagcgtccgtcacgtactcggtcaagggttcgacctggaacatcaagatgaaggccgaggctctgaaccacaagacccccctcctgctcactcagcacacctacttcaacctggacgcctaccgcaacccggacacggccaagatctgggaccacgggctatacctgccgtactcgaagcggtacctcgagggcgaccagggggcgctgccgacgggcaagatcctgacggcggagcccgggtcgatcaacgacttcgcgtcgtcggcggacctgacggtcgggcacgcgcgggaccagcccggccgtccgccgacgccgtcgtcctccgcctgtcgagcgccttctcgggcgtcaccgccgacctgcgcaccgaccagcccgggcgtcgtcctctactcgtgcaactggatggacggctccgccgacctcaagagcacccagggcatcaagggcgtcaacgagaaggtcatcaggagcagctgcatcgccatcgaagcccaggactacccggatggcatcaaccatcctgaatggggacgtaccgaagcgcagatctggggcccgggtgagacgtacttgtgggagagctcgtggacctttgggttgctcgaagcctga

SEQ ID NO: 4841 - protein, 355 aa, Myceliophthora thermophilia
MAAEASVIGRERHVPPPGEDGRYTISAEGIKAQFIPYGATLTNLFVKDKNGEDIDVVLGYDDVNYYPEDPGHPVYNAIPGRYANRIGNGKYTLDGKTYFTEKNDGNNTLHSGTNNWSYRVWDVTDVKQDSITFSILDKANSSQGFPGDVKASVTYSVKGSTWNIKMKAEALNHKTPLLLTQHTYFNLDAYRNPDTAKIWDHGLYLPYSKRYLEGDQGALPTGKILTAEPGSINDFASSADLTVGHARDQPGRPPTPSSSACRAPSRASPPTCAPTSPGVVLYSCNWMDGSADLKSTQGIKGVNEKVIRSSCIAIEAQDYPDGINHPEWGRTEAQIWGPGETYLWESSWTFGLLEA

SEQ ID NO: 4842 - DNA, 2631 bp, Myceliophthora thermophilia
atgttgtcccggccggcctttagcatccgcaaactgatcccgagtccccagaagaagcagcatgacggcccggaggactacgaggggtcgtacttctaccacgatgacgatgacgagatggacacactcagccggatcaagacatggaggccgccaatggggttgatgaagcggtccaaagcgagcgtcgacgtccggcggagcgaagacctgcaccagatcatctgcatcccgccattgcccgatacgccgcagtcttccactacttctttgtgcagcgttgacaatggctccggttacgtcgtgaatgccaaccctcgctcttcgcctccccgccgtccggacaggagtcctttggcgagcccctggatgagccctcagaggagtccccagaggagccctcaaagaagtccgcttcttctgccccaacaatttgaggaccaacaacatccaacgcgaggcagggccacggagccgacccacacgcttcagccgcctcagctgacacctccctcgtcccctccccaacaagccgatatggccatggcccttgagacgccggtgacctcaccggatactctgccgtcaacacccgcgaccgccagcaccggccagccgacgtcgccggaagctgtcacggtgacgccgccaccagtgacacccagaggggccaacaacagcaccgtctcctcacaggacgttcggactctcacgccccaagccggcgagggatcaggactgggccaaaccgtgagccacagaaagttgtctgaccttgaattggacaagttcccgaagcccaaaaatccatcgccagtgtcggctcctgcgcgcaggaagtcacagcggcgaagccaaggctcggtcaagtccgtcaagtctccaacaaagacatcgatgaaagaccctttgttacccgcccaagcgcggcttccctcgggctctcgcccgaagcgggccaagtccaaaaagtcccggagaaagccccgtgttgcagcaaggcaatcatccgtgtggcaattgacggaaagcgccaaggacttgttcacaatacgcatcttccatcggatagaggtcgacgagatgctgcccgaaagcacgctgcaagagatccgcatgagcagggcagctcgctggacgaggtcccccgaactcggcgtcactcacatcaaggagaagccgaaagggaaagaagggaaagaagggaaagagagcgcagctactacgcccattgagcctctcagcctcgacgactctcttgatgccgcgatggcggaggacatggttaccccccgcgcctctgtcatcaaccaagccacagcgactcaaggagaggactgcaagacgcccacggcgccctccaaagggcagctgaaaccagcaggcgaggcggcgattggccaggcaagcaccgaaccgcaagtggaagaaccgccgctgcctgtacaacaacctgactcaccaaccgccaagtcgtgcgatgggggagaagatgaagggaacctgccgatcatgatggttgttgagggcgagccggccgcgccacctcggccggcgccgtcgcctcaattggctgcatcgccaatgcccccttcgctcaaatctcctacgcatcgccgcatgccgagcaggcaactgccacccctccccaccatccctgaggttatcacgacgggccccgaggaagcgaccctgtccccgacctcgacaccgctgccgcccggaactgcggccaaggcgaacacggatgactacatctccctcgacagcaatccctatactctgacgatgccgaccttccggcacggccagatccgcctggccaaggccgatctgccaatcggcaaactggccgcggccgtcgacgacacgctggactggacggcgtttcagatggcgatccttggcggcgcaggcgacttttttagcgagccgaccgactactcacggccgtccgaggcggaactggatgagctcgaagagctaacctcgtggttcggcggcttcgggttcggcgggccagggtctctcatcggtccgagcgaacctcggactcctatccagccctggacccccgtcttccctcgcacccctactctctcgcctccgtcgccgacctccacgcccaacagcagcccgcggacggtagtcaacggccgcagtcccgtcatgcggcggattgatccgcctgccgcaaccggcgccgagtgcagcaacaatcataacaacaacggtttctctctcggtgactctatcgccggccgcttcttcccttcccggtcgctcgtcccgcctggacccggctactcccccggccaccgacgcagcgtgagcagcacaacctttgggcaggcgccctcccaaccgaaattgacgcactcggcatcctttgagagccgcaaccatgccggcctctccatcgatgcgacgcggcgtcccagtgtcgacagcatccagagcctgccgcagagccccatgatggatctcgtcgtcagccatgatgtagacggcaacgagtacatggtgccaatgggattcaatctcagccacgacttgggtgactacctgacgtggcaggccgagcatgtcaccggggctgggtttgctggcgatggggggagccatatctga

SEQ ID NO: 4843 - protein, 876 aa, Myceliophthora thermophilia
MLSRPAFSIRKLIPSPQKKQHDGPEDYEGSYFYHDDDDEMDTLSRIKTWRPPMGLMKRSKASVDVRRSEDLHQIICIPPLPDTPQSSTTSLCSVDNGSGYVVNANPRSSPPRRPDRSPLASPWMSPQRSPQRSPQRSPLLLPQQFEDQQHPTRGRATEPTHTLQPPQLTPPSSPPQQADMAMALETPVTSPDTLPSTPATASTGQPTSPEAVTVTPPPVTPRGANNSTVSSQDVRTLTPQAGEGSGLGQTVSHRKLSDLELDKFPKPKNPSPVSAPARRKSQRRSQGSVKSVKSPTKTSMKDPLLPAQARLPSGSRPKRAKSKKSRRKPRVAARQSSVWQLTESAKDLFTIRIFHRIEVDEMLPESTLQEIRMSRAARWTRSPELGVTHIKEKPKGKEGKEGKESAATTPIEPLSLDDSLDAAMAEDMVTPRASVINQATATQGEDCKTPTAPSKGQLKPAGEAAIGQASTEPQVEEPPLPVQQPDSPTAKSCDGGEDEGNLPIMMVVEGEPAAPPRPAPSPQLAASPMPPSLKSPTHRRMPSRQLPPLPTIPEVITTGPEEATLSPTSTPLPPGTAAKANTDDYISLDSNPYTLTMPTFRHGQIRLAKADLPIGKLAAAVDDTLDWTAFQMAILGGAGDFFSEPTDYSRPSEAELDELEELTSWFGGFGFGGPGSLIGPSEPRTPIQPWTPVFPRTPTLSPPSPTSTPNSSPRTVVNGRSPVMRRIDPPAATGAECSNNHNNNGFSLGDSIAGRFFPSRSLVPPGPGYSPGHRRSVSSTTFGQAPSQPKLTHSASFESRNHAGLSIDATRRPSVDSIQSLPQSPMMDLVVSHDVDGNEYMVPMGFNLSHDLGDYLTWQAEHVTGAGFAGDGGSHI

SEQ ID NO: 4844 - DNA, 2034 bp, Myceliophthora thermophilia
atggatcacccgcaagaccaggtccagcgccattccctcactgatcccgagggcttctgggcacaccaggccgagcagctgcactggcacaagaaaccctcggccgtcctcgcccgcaccaccaagacccttaagtcgggcaacaagcacgcccactgggagtggtttccagatggagagatatcgacatgctacaattgccttgaccgccacgtgctggccggtcacggcgacgccccggccattctctacgacagccccgtcacaaacaccaagcagcgcatcacgtacgcgcagctccttgacgaggttgaggttttcgctggcgtgctgagggaggaaggcgtaaagaagggggacgtcgtgcttgtctacatgcccatgattcccgccgctctgatcggcatcctcgcaatcaaccgcctgggtgctgtgcatgcagtcgtcttcggcgggtttgccgcgaacgcactagcccagcgcatcgaggcctcgcggcccgtcgccatcctcacggcctcgtgtggcatcaatggtaacaagccgcctatcccctaccgcgacttcatcgacgaggccgtccgcatctcttcgtggaaaccgccaaaaaccattatctggcaagtgcaacgtgaacaactcctctggcgccctacccgcaagttgcaaggcgagaggaagtggcagcacctggtcaagagcgcccgtgcccgtaaccagagggccgagtgtgtgcccgtcaggtcctcggaccccatctacatcatttacaccagcggcacaaccggcctgccaaaaggtgtggtaagggagactggcggccacgctgtcggcctccacctgaccatctcttatgtttttggcatccatggcccgggcgatgtgatgggttgcttcagcgatattggttgggttgtctcccacagctacaccctctatggcccccttcttaccggcgctgccagcgtcatctacgaaggcaagcccgtcggcactcctgacgcatccgccttttggcgtctggtcgacgagtacaaaatcaacaccatgttcacggcgccaaccgccctccgcgcaatccgcaaagacgacccggacaacgcccacttcacccgagtcggcgaacgtggcggactcaggagcctcaaggccctgttcgtcgccggtgagcgatccgagccggccatcatcaccatgtaccagtccctcctcaacaaatacgcggctgagggcgcccaggtgatagataactggtggtcatccgagtcaggttcgccaatctccggcattgccctcgcgcctcatgcgggcaggaataggaagactgggatgaaggagaagcagaggcctttggaaatcaagccggggagtgcaggcaaggcgatgccgggattcgatgtgagggttgtcgacgaccaaggcgtcgaagtcgaacgcggcaagatgggcaacattgttctcgccctcccgctcgcccccactgcctttcgcacgctctggaaagacgaggagcggttctacaagggctacttgaagcggtttgacgggaaatggctcgacacgggcgacgcagggttggtcgacgagaatggctatatccacatcatggggcggtcagacgacataatcaacgtagccgcccatcgcctcagctcaggcgccctcgagcaagcaatcagctcccacccgctcgtgaccgaagcctgcgtggtcggcatcccagactcaaaggccatctaccaggaggaggagaagctgtacggcgagattcagagcctcgtccgctcccaagtcggcgccatcgccacgctcggcggcatggtggtcgggcgcggcatgatccccaagacgcgctcgggcaaaaccctgcggagggtgctccgggagctgatcgagaatgccgtccttcacggggacgtggacaggccggtgaacgtgccgtcaaccgtcgaggatgcgggtgtggtgggcgtcgcgagggaggggatcagggagtactttaagcgtaggggcggtctaaaggcgaagctctga

SEQ ID NO: 4845 - protein, 677 aa, Myceliophthora thermophilia
MDHPQDQVQRHSLTDPEGFWAHQAEQLHWHKKPSAVLARTTKTLKSGNKHAHWEWFPDGEISTCYNCLDRHVLAGHGDAPAILYDSPVTNTKQRITYAQLLDEVEVFAGVLREEGVKKGDVVLVYMPMIPAALIGILAINRLGAVHAVVFGGFAANALAQRIEASRPVAILTASCGINGNKPPIPYRDFIDEAVRISSWKPPKTIIWQVQREQLLWRPTRKLQGERKWQHLVKSARARNQRAECVPVRSSDPIYIIYTSGTTGLPKGVVRETGGHAVGLHLTISYVFGIHGPGDVMGCFSDIGWVVSHSYTLYGPLLTGAASVIYEGKPVGTPDASAFWRLVDEYKINTMFTAPTALRAIRKDDPDNAHFTRVGERGGLRSLKALFVAGERSEPAIITMYQSLLNKYAAEGAQVIDNWWSSESGSPISGIALAPHAGRNRKTGMKEKQRPLEIKPGSAGKAMPGFDVRVVDDQGVEVERGKMGNIVLALPLAPTAFRTLWKDEERFYKGYLKRFDGKWLDTGDAGLVDENGYIHIMGRSDDIINVAAHRLSSGALEQAISSHPLVTEACVVGIPDSKAIYQEEEKLYGEIQSLVRSQVGAIATLGGMVVGRGMIPKTRSGKTLRRVLRELIENAVLHGDVDRPVNVPSTVEDAGVVGVAREGIREYFKRRGGLKAKL

SEQ ID NO: 4846 - DNA, 1734 bp, Myceliophthora thermophilia
atgaacagcgcagcacctgaaatgtattattcgcagcacatgtccgccggcccggcaccgccgccgcagacggtcacctccccttatactcaccagcacccccaacagcactcgcagccaaccctgttgcagcctggtcctggccagtatgctcctcctccgcagtatgggggccaatatgcctatgccaacggtctgagcccgccgacagggcccccggtttccaacgccttgagtgcaccgcaaccagtcctgccgcttccgggcgtcagccaaccgggggtgcccaactctccgtacggtggcagcaccttcgacacgacgggtcagattgcgccgccaggagtgaagccccgtgtcacggcaaccctgtgggaagatgagggctccctctgctttcaggttgaggcccggggcatttgtgtcgctcgccgggaggacaattccatgatcaacggcaccaagctcttgaacgtggcaggcatgactcgcggtcgtcgagatggcattctcaagagcgaaaaggtccgccacgttgtcaagatcggtcccatgcatctgaagggagtttggattccctttgagcgggcgctcgattttgccaacaaggagaagattacggagctgctgtatcccctcttcgtccataacatcagcaatcttctctgccacccgaccaaccagagtcgaggccaagttatggcagcggcacagcgtaaaccgatccctggactgccgtccctcccgcatcatcaattggcgctgccagggccccaaccgccgctatcatcccaccctccatcaatgtggaatcagcaggggatggggaatggacaaggacccaaccaggtgtcaatcgacactagtttgactaacaactctcgctcgctgccgagcacgcccgcggccacgccgtccggttccagcctgcaaagcatgcagaattatccgcctgcgagccagccgtacgataactcgcgcccgatgtaccagccgggaccgccgtcctcgtcgtatccgccaccgtcaaatgacaggcctcccatctacaccaacacgcacaacaactacgtgaagagcgagatgggtccgccagcaaaccgttccaatggttccaacgctgagcagggtgatacgaaacctccgaatggcatcatgcaagccagccaaggcgaggcgggagcaagcgccgaggaggaagcagaccacgagaacgacggcgagtacacccatgacagcggggcttatgatgcgaaccggagtacttacccgtacaaccctcctccggtttcctccctctcaaacgatcattcgcacatttctcctgagctggcaggctcgccgcatcaagccggatccggccgggcgacacctaggacagccgccgctccgcagccgtattatgggccacagggatacagtactccgccgcgggtgggacagacgtcgagcaacctgtataatgtggtcagcaacgagcgcggatccgccaacggcacgtcgaccaacgacgtttatggcaaccaaggcgacatgtcaggctcgatgcccaacggatatcccgtgctgagtggtgtgacgacactgaagagaggacgagacgaggacgatgaccggggagacatgaagcgccagaagggactggttaacggcactgggtcaatgccatcccccacgttcaacaaccagatgacccagccgacggctgccatctcagcacagagacgcaggtaa

SEQ ID NO: 4847 - protein, 577 aa, Myceliophthora thermophilia
MNSAAPEMYYSQHMSAGPAPPPQTVTSPYTHQHPQQHSQPTLLQPGPGQYAPPPQYGGQYAYANGLSPPTGPPVSNALSAPQPVLPLPGVSQPGVPNSPYGGSTFDTTGQIAPPGVKPRVTATLWEDEGSLCFQVEARGICVARREDNSMINGTKLLNVAGMTRGRRDGILKSEKVRHVVKIGPMHLKGVWIPFERALDFANKEKITELLYPLFVHNISNLLCHPTNQSRGQVMAAAQRKPIPGLPSLPHHQLALPGPQPPLSSHPPSMWNQQGMGNGQGPNQVSIDTSLTNNSRSLPSTPAATPSGSSLQSMQNYPPASQPYDNSRPMYQPGPPSSSYPPPSNDRPPIYTNTHNNYVKSEMGPPANRSNGSNAEQGDTKPPNGIMQASQGEAGASAEEEADHENDGEYTHDSGAYDANRSTYPYNPPPVSSLSNDHSHISPELAGSPHQAGSGRATPRTAAAPQPYYGPQGYSTPPRVGQTSSNLYNVVSNERGSANGTSTNDVYGNQGDMSGSMPNGYPVLSGVTTLKRGRDEDDDRGDMKRQKGLVNGTGSMPSPTFNNQMTQPTAAISAQRRR

SEQ ID NO: 4848 - DNA, 2304 bp, Myceliophthora thermophilia
atggatccgccaccgccgcctccgcctccgcacggggagaaccccaggacgacggccggtggctccggcctcccgcccgggaagtatgacatcttcatcatccccgaacactcggccggctcgggtttcctatacctgccgtctctcaagccccaatggaacagcttcatcgccggggtcgtcagtacactggcggtggttatcatgacaaacctggccactcctctgttggtgagcatgtttagcagcccagacaaaatgtggtcattcctgtgggcaaccctggtggcctgtgtcggcgctgcagcatttctcctgggtcgccaccagagcgagccctcggcccagcaaagtcacggaggcaatcgccccgggggctacggaaagccgggtggaggatacgggggagcagggtcgtcatggtataccccgccccctcaaaacggccctccgccaaaccagtcaccacctccgcctcctccgcctcctccgccccagcatgacgcgccgagaggcggcggcgggccgtaccaatcctggcacgagcaaccgagacagcaaccccaacctgagccccaacctcaaccccaacctcaaccccaacctcaaccccaacctcaacctcaacctcaagcccaaacccagcctccgccccaaccgaacactcagacgcagcctgaaccgacaccggaggcgaagccgcaagaaccgaaacgggaggagcccagcgaagagcccaagccgcaaccaaagcctccaccagagccgaagcaacagcctcaaccacctccccctcagcccgcttccgccaaacctgaggccccaaaaggcgcttgggaaaaagcgagggaggagatgcgtcgaagagaggaggagcgaaaagcgaaggaggcagaggctaagaagaaggaggaaactgctcggcggttgcgtgaattacgcgagcgagaagcgagggagcgcgatctcaaggagaaactccggcaggagcaggaggctaaagaaagggaacgcttggaacgggaactacgggaaaaggttgagagggagctacgtgagaagatcgagagggagaacaaggagcgtgaggaggccagactcaaggaggagcagcggaagctggaagaagagcgggcacggcaggaaaaggagcgccaagctgctcgggagagggaacgaaaggagcgcgaagagcgcttggcccggcttcgcagggagcaggaggagaaggagaagaaggagaaggaacagaatgagcgcaagagcacgacctatgcgtactcgtcggtcggcgagaagaccagcatgtggccaaacggcaaaccgccaagcgtcgcgccatcccaagcggcgtctactcctccaccatcgagaccatctcctgcgcaagctcctcccccatccccaacgaaaccggccccttcgccaacccgctccgccccatcccccaccaagcctgctccctccgccactgggaccgaagacacctactcgttccgcccctacgacaccccgaaaaagcccactgcccgcaagaagtcggtttcagacttatccgaatcttcctgggccccctcggcctccaccgcacgcaccaccccgccaccctccacccgcggaccctacacgactaacgacccccaaaagatcgtcatcaaggccgtttacggctacctcaaccagttctccaagacccccgcctcccagctcgtctcgggcgtggcccccgtcacggatggcctcatcctgcgcatcacctcggcgggtctcttcgtcgacgacgacgcgcgcggcgtcgcccagcgcgagtgggacatcaaggcctggaccctcaagctcgtcgaggtctggtgccctgtccacgccgtctccgcccaggccggaaacacccccggctccgtgcccgtcaaccacccgttcttcaagaccatgccgcagagcgcgcggcgggcggccgagcgcggcgccaccaagacgatgctcggcgaggaggcggtccagtacatcgaagagttcgggagggtatgcaacgggaactgtcgccgggccggggctgggtcggctgcgggtgcgggtgcgggtgcgggtgccgaaaagggcagcggcctgcatctgctgcgggccacgatcagagatcaggagggcaagcggttcttgtttgtggtcggagaggaggaggcatggaagattgccaacggcctggccgcgctcaggggaagcagccaggtcagggcgttgggcgtcgccgggttcagtacgatggagtccaagacgctgttggataccctcggatggacggcctaa

SEQ ID NO: 4849 - protein, 767 aa, Myceliophthora thermophilia
MDPPPPPPPPHGENPRTTAGGSGLPPGKYDIFIIPEHSAGSGFLYLPSLKPQWNSFIAGVVSTLAVVIMTNLATPLLVSMFSSPDKMWSFLWATLVACVGAAAFLLGRHQSEPSAQQSHGGNRPGGYGKPGGGYGGAGSSWYTPPPQNGPPPNQSPPPPPPPPPPQHDAPRGGGGPYQSWHEQPRQQPQPEPQPQPQPQPQPQPQPQPQPQAQTQPPPQPNTQTQPEPTPEAKPQEPKREEPSEEPKPQPKPPPEPKQQPQPPPPQPASAKPEAPKGAWEKAREEMRRREEERKAKEAEAKKKEETARRLRELREREARERDLKEKLRQEQEAKERERLERELREKVERELREKIERENKEREEARLKEEQRKLEEERARQEKERQAARERERKEREERLARLRREQEEKEKKEKEQNERKSTTYAYSSVGEKTSMWPNGKPPSVAPSQAASTPPPSRPSPAQAPPPSPTKPAPSPTRSAPSPTKPAPSATGTEDTYSFRPYDTPKKPTARKKSVSDLSESSWAPSASTARTTPPPSTRGPYTTNDPQKIVIKAVYGYLNQFSKTPASQLVSGVAPVTDGLILRITSAGLFVDDDARGVAQREWDIKAWTLKLVEVWCPVHAVSAQAGNTPGSVPVNHPFFKTMPQSARRAAERGATKTMLGEEAVQYIEEFGRVCNGNCRRAGAGSAAGAGAGAGAEKGSGLHLLRATIRDQEGKRFLFVVGEEEAWKIANGLAALRGSSQVRALGVAGFSTMESKTLLDTLGWTA

SEQ ID NO: 4850 - DNA, 1290 bp, Myceliophthora thermophilia
atgacgaccattattctgggctcccaatggggggacgagggcaagggaaagctcagcgatatcctctgccaaaaagctcgcgtctgcgcccgcgctgctggtggccataatgccggccactctgttattgccaatggcgtgtcctatgacttccacctcttaccctctggtctcgttaacccgcaatgcaccaacctgattggctcgggcgtcgtcttcaacgtcgaggccttcttcaaggagctcgccgccctcgaggccaaaggactatcgcacgtgcgcaagaacatcctcgtcagcgaccgcgcccaggtcaacctcgaactgcatgcccgcgtcgatggcctagaggagaaggagctcgcgggcaacaagattggtaccaccggccgcggcattggcccctcgtatgccaacaaggcagctcgtaacgggatccgggtgcacgagatttttgaccaggaaaccttcgagaggaagctacgcaggctggcggaggggtacaagaagcggttcggtgatctgctcgagtacgatgttgaggaggagattgcgcgcttccgcgagtatcgcgggatgctgggcgagtacgtcgtggacgccgtcaactacatgcacgcggcgcaggcgaagggggtcgacatcctgatcgaaggtgccaacgcgcttatgctggatatcgactacggcacatatccgttcgttaccagcagcaacaccggcttgggtggcatcattaccggactcgccgtcaaccccaggggaatcaagtcattcttcagggagattatcggtgttgcaaaggcgtacacgacaagagttggagaaggcatcttcaagtcagaagaccttggcgaggcaggcaagaagctgcaagaaattggccgcgaatggggagtctcgaccggcaggaagcggagatgcggctggctcgacctcgtcgtgctgaagtactcggcctcggtcaactactacacgtcatggaacctgacaaaactcgacgtccttgacaccttcccaacgatcaaggtcgcagtggcctacaaagaccccgataccggagaagagctcgattacttcccggctgaccttggctacctcgagagatgcgaggtcgtgtataaggagtttgagggttggcagaccaagacgacgtcagtgagaaaatttgaggacttgccgcgacaagcgcaatcatacgtcaattttatcgaggagtacactggcattccggtgaagtggattggaacaggaccggcgcgcgacgacatgatctaccgaaaagcatag

SEQ ID NO: 4851 - protein, 429 aa, Myceliophthora thermophilia
MTTIILGSQWGDEGKGKLSDILCQKARVCARAAGGHNAGHSVIANGVSYDFHLLPSGLVNPQCTNLIGSGVVFNVEAFFKELAALEAKGLSHVRKNILVSDRAQVNLELHARVDGLEEKELAGNKIGTTGRGIGPSYANKAARNGIRVHEIFDQETFERKLRRLAEGYKKRFGDLLEYDVEEEIARFREYRGMLGEYVVDAVNYMHAAQAKGVDILIEGANALMLDIDYGTYPFVTSSNTGLGGIITGLAVNPRGIKSFFREIIGVAKAYTTRVGEGIFKSEDLGEAGKKLQEIGREWGVSTGRKRRCGWLDLVVLKYSASVNYYTSWNLTKLDVLDTFPTIKVAVAYKDPDTGEELDYFPADLGYLERCEVVYKEFEGWQTKTTSVRKFEDLPRQAQSYVNFIEEYTGIPVKWIGTGPARDDMIYRKA

SEQ ID NO: 4852 - DNA, 2292 bp, Myceliophthora thermophilia
atggcggcggtgcagcaattggagccggtcccgacaccggctgcacggccgcagagtatagctgacagccctttcaccaacaacggtgacacggagcgcgcgtcaccacccgcccagcccggcatttcattgtgcagcgagccccagagaggagacaccaggatcgtcgtcatcatgtttggcaagggccaggagaagatcgtttctgttttcgccgaggttctggggaaaccgtcaaaaatgaagcctcgcttcgagagtatcaccaaagacgaccagggttgggtaattggcattccggcagatagcgccaaggacgacattgcgacgcgggacagaggactcgtcgttgctatcaatgcccattgcaccggtctgggaatgcctcccgacgtctatctttcagctcagtgcgattacgagtttctctacaccgagtcccccttctttcgcagggatcttgcccgcttcacctcacatatcctcggccagatatgtcaccacagagcgctcatggcaaagcccaggaccttcatcatctcgaccacgttcccggacgtacatgccgccttgcccaacatcgacatcctgactgtcggcgctgatgccatcgagatccgcgtcgaccttctcaaggagcccctgggggacgggacttactccgagatttccagtctcagctatgtcggagagcagctcatgttgctcaggcagaggaccgagctgcccatcatcttcacgacgaggtgcaccaatgagaacggccggtttccgatggacaatccggggctgtactacgagtacctgtatcgggctctgcaatggggcgtcgagtatcttgatgttgagctttggcttcccgagagcatccggaagaaattgtacgagcagcgtgggaacagtcgcatcatgtccgcttttcacgacttctccgggaccttcaaatggacctcggaacgggccgagtcgattttcctcgaatcacaacgctacgccgactgcgtcaagatgattgccatcatcaatgaccacaacgaaaactttgagctcgagtatttccggtccaagatcaaggcaaaatatcccgactcggttccattgtctgccgtcaacatgggcgagacgggccaattctcgcggacgctcaacaaggtcttcacgccaatcactcatcctcttctgcccatcatcgcggctccgggacagatgagcgccgccgagatcaaccaggcgctggcgctgctcgggcaattgcccaaaaagaacatgtacggcatcacgagcccggcgatgcgcagcgtgacacctcaggcccctttctacgaaaagtgctttaacgagctaggtttgccccatcagttcgccgtcgtggagtggcagccaaaagggcccggttgtatcgggacgtggtgcaaccagaagaactttggcggggcttacttcaacccagcggtttctctcaagagcctggcgacccatagcgacttcctcgcgtccctcaataacggggccgggcctaccgtcagcgaagctgctcgacttatcggcatggtcgacaccatcgtcgtgcggcccgccccttcgagcgccccgacgtccgcgccgtcgtcgataccgtcgagccctccgcgccacaagaacggggattcgtacagcgccctgggtccgtcccaatcaggcctccctcctaacaccacgctcgtcctcgacaacgcttcctggaagggcatcttgagcacactaacccgcgattttgccccgtcagcctacttcggatgcgccgccgtcgtcctcgcctcgtctgccgaagacgccgctagcgccctcttcgccctcaaggccctcaaggtcggcaaggtctacacggtcgggttcaagacgcccccggcattcggcaaagacctcctcatcgagcccttcacaagcctcgagagcattcagagagcgcgcaccgttggcgcgaacggttccaatgtcgggacaggcacgggttcgccattcttggtcgtcagcgccctagggccggaaaagagcacgctcgtggggatgctggtgcggctgttcggcacaaggggctcagggaccgattcccgaaaggtgtttttggatctcgcggaccggccggcctcagcgaagggcgacccggccctgattgccgagcggagcgggtttgcggcttatggcgctgccgacgttacggccttcaccacggtggaaacgctacggctgctggtcgggcagaatgttccgtacagctttgtgagattagccagtggtcgaacgctgttttga

SEQ ID NO: 4853 - protein, 763 aa, Myceliophthora thermophilia
MAAVQQLEPVPTPAARPQSIADSPFTNNGDTERASPPAQPGISLCSEPQRGDTRIVVIMFGKGQEKIVSVFAEVLGKPSKMKPRFESITKDDQGWVIGIPADSAKDDIATRDRGLVVAINAHCTGLGMPPDVYLSAQCDYEFLYTESPFFRRDLARFTSHILGQICHHRALMAKPRTFIISTTFPDVHAALPNIDILTVGADAIEIRVDLLKEPLGDGTYSEISSLSYVGEQLMLLRQRTELPIIFTTRCTNENGRFPMDNPGLYYEYLYRALQWGVEYLDVELWLPESIRKKLYEQRGNSRIMSAFHDFSGTFKWTSERAESIFLESQRYADCVKMIAIINDHNENFELEYFRSKIKAKYPDSVPLSAVNMGETGQFSRTLNKVFTPITHPLLPIIAAPGQMSAAEINQALALLGQLPKKNMYGITSPAMRSVTPQAPFYEKCFNELGLPHQFAVVEWQPKGPGCIGTWCNQKNFGGAYFNPAVSLKSLATHSDFLASLNNGAGPTVSEAARLIGMVDTIVVRPAPSSAPTSAPSSIPSSPPRHKNGDSYSALGPSQSGLPPNTTLVLDNASWKGILSTLTRDFAPSAYFGCAAVVLASSAEDAASALFALKALKVGKVYTVGFKTPPAFGKDLLIEPFTSLESIQRARTVGANGSNVGTGTGSPFLVVSALGPEKSTLVGMLVRLFGTRGSGTDSRKVFLDLADRPASAKGDPALIAERSGFAAYGAADVTAFTTVETLRLLVGQNVPYSFVRLASGRTLF

SEQ ID NO: 4854 - DNA, 1344 bp, Myceliophthora thermophilia
atgaccatattctcggcccgcgagcgtgccagcacctggcgtcagctttgggtctggcttgccgaggccgagaaggagttggggctccccatcccggacgaggccattgagcagatgcgcgccaacgtgatcgtgtccgacaaggccttcgcagtcgctcgtgattacgaggccaagttccgccatgatgtcatggctcacgtccacgcctttggcgagctgacggggcgcatcattcaggacgctcctgctgctgctggccatatccacctcggtgctactagctgctatgttaccgacaacgccgacttgattttcatcaagcgtgctctcgatctcattctccctaagctggccaaggtcatccaaaaccttcaggagtttgctctcaaatacaaggacatgcccaccctgggattcacacattatcagccggcccagctcatcactgttggcaagcgcgccgcccaatggatccaggaactcatgatggacctggaagatattgagaccgtccgcgaaaggctccagttccggggtgctcagggcaccactggttcacaggcgacattcctcgagcttttcaatggggacgccagcaagatcgttaagctcaatgagctggctaacgacccccagattctttgcaagaaggctgggttcccatccacctttgctatctcgacccagacgtacaccaggaaggtcgacctccgcgttgccaatgccgtttgcgcgctgggagcaaccgccgagcggatctgctccgatattcgtcacctagccaacctgaaggagatggaagaaccgttcgaaaagagccagattggaagctctgccatggcctacaagcgcaaccccatgaggtctgaacgcatcactgcccttggccgcaagctcgcccgcctgccggccaacttcactgcaaccttcgaaacccaatggtttgagaggactcttgatgacagcgccatccgccggatggatattccggagatgtttctgctggcggactctatcctgcttgcgctggacaatgtcaccaacggtctggtcatttacccgaacgtcatccggtcccgcattgaccaagagcttccattcatggcaactgagtccattctgatgaagctcgcccagcacggtgtttctcgtcaggaagcgcatgaggaaattcgcgtgctacccgtctgggacgagattgacagcctcgtcgaccccaagctgttcattggcaactcgcccaagatcgtggaagactactgcaacggtgaggtcgccgcaaagttggccaagtacaaggagtcgcttgctacagcctcgacggcgcaactctcgatctaa

SEQ ID NO: 4855 - protein, 447 aa, Myceliophthora thermophilia
MTIFSARERASTWRQLWVWLAEAEKELGLPIPDEAIEQMRANVIVSDKAFAVARDYEAKFRHDVMAHVHAFGELTGRIIQDAPAAAGHIHLGATSCYVTDNADLIFIKRALDLILPKLAKVIQNLQEFALKYKDMPTLGFTHYQPAQLITVGKRAAQWIQELMMDLEDIETVRERLQFRGAQGTTGSQATFLELFNGDASKIVKLNELANDPQILCKKAGFPSTFAISTQTYTRKVDLRVANAVCALGATAERICSDIRHLANLKEMEEPFEKSQIGSSAMAYKRNPMRSERITALGRKLARLPANFTATFETQWFERTLDDSAIRRMDIPEMFLLADSILLALDNVTNGLVIYPNVIRSRIDQELPFMATESILMKLAQHGVSRQEAHEEIRVLPVWDEIDSLVDPKLFIGNSPKIVEDYCNGEVAAKLAKYKESLATASTAQLSI

SEQ ID NO: 4856 - DNA, 1302 bp, Myceliophthora thermophilia
atgtccgcgatgcgagagtttccaaccatcaaggccatccggtcttatgtcatcagcggcgtcgggtcgggcggcgactatcacaacgtgaagggcgggcactggttgatcgactcacccatctcgacaccgtgctcaagatgggagaaataccgggcttcgagaactagctggggcatcaacgtgctgggctcgttctttatcgaggtcgaggcgaccgatggcaccgtcggctatgcaaccggcttcggcgggccaccggcgtgctggctggtccaccagcactttgagcgattcttgatcggagccgatccgcgtaacacaaaccatcttttcgagcaaatgtaccgcgcgtccatgttctacggccgcaagggtcttccggtcgccgtcatctccgtcatcgacctggcaatctgggacctgctgggcaagatccgcggcgagcccgtctacaagctcatcggcggcaacaccaaggatcgcatcgacttttactgcaccggtcccgagcccaccgccgccaaggccatgggtttctggggcgccaaggtgccactgccctactgcccggaggaaggccaggcgggcctgaaaaagaatgtcgagtttctgcgcaaacatcggcaggcggtcggtcccgacttcccgctcatggttgactgctacatgtcacttaacgtgccgtacacgatcgagattgccaaggcgtgcgaggacctcaacatcaactggtgggaggagtgcctcagccctgacgacacggacgggtttgagcagatcaagcgggcgcacccgaccctcaagttcacgacgggcgagcacgaatactcgcgatatggattccgcaagctcatcgagggccgcaacctcgacatcatccagcccgacgtcatgtggctggggggcatgacggagctgctcaaggtggcggccatggcggcggcgtacgacatccccgtggtgccgcacgccagcgggccgtatagctaccacttcgtcatcagccagcccaacacgccgttccaggagtatctggccaactcgccggacggaaagagcgtgctgccagtgtttggggatctcttcgtggacgagcctattccgacaaaggggtacttgacggtggcggagttggacaagccgggattcggactgacactcaacccggcggccaggtcaaagctgattccagccacgtacctcctgacccccccgaccgcttcattgagcccgcctacgaacggggtgccggcggagaatgagtgcaaggaagcggtggacagctcgaagacagcttga

SEQ ID NO: 4857 - protein, 433 aa, Myceliophthora thermophilia
MSAMREFPTIKAIRSYVISGVGSGGDYHNVKGGHWLIDSPISTPCSRWEKYRASRTSWGINVLGSFFIEVEATDGTVGYATGFGGPPACWLVHQHFERFLIGADPRNTNHLFEQMYRASMFYGRKGLPVAVISVIDLAIWDLLGKIRGEPVYKLIGGNTKDRIDFYCTGPEPTAAKAMGFWGAKVPLPYCPEEGQAGLKKNVEFLRKHRQAVGPDFPLMVDCYMSLNVPYTIEIAKACEDLNINWWEECLSPDDTDGFEQIKRAHPTLKFTTGEHEYSRYGFRKLIEGRNLDIIQPDVMWLGGMTELLKVAAMAAAYDIPVVPHASGPYSYHFVISQPNTPFQEYLANSPDGKSVLPVFGDLFVDEPIPTKGYLTVAELDKPGFGLTLNPAARSKLIPATYLLTPPTASLSPPTNGVPAENECKEAVDSSKTA

SEQ ID NO: 4858 - DNA, 1185 bp, Myceliophthora thermophilia
atggcggaccgccatcctactctgtcccagtccttcgccgagcgggcgaagacggctagccacccgctcacccgctacctctttcggctcatggacctcaaggcctcgaacctgtgcctgagcgccgacgtgtccaccgcgcgcgagcttctgacgctggccgaccgggtcggcccctcgatcgtcgtgctcaagacgcactacgacctgatctcgggctgggactacaacccgcaaaccggcaccggcgcgaagctggccgccctggcgaggaagcatggcttcctcatctttgaggaccgcaagtttgtcgacattggtaagacggtgcagatgcagtacacggctggcactgcgcgcataatagagtgggcgcacatcaccaacgccaacatcgacgccggcaaggacatggtgcgcgccatggccgaggcggccgccaagtggaaggaacgcatcaactacgaggtcaagacctccgtcacggtgggcacgcccgtctcggaccagttcgacgatgcggaagagcaagcgcagtggccgcagcaccagcagcaccagcaccagcaccagcaccagcaacagcgagatgaaaaaggtgggccccgcaggctcggcactcgggaggagcagcaccaacaggacaacggagacggtgacggccggaaagggagcattgtctcgatcactacggtgacgcagtcatttgagcccgctcactccccacgcctgtccaagagcaacgagctgggcgacgacgccgtcttccccggcatcgaggaggcccccgtcgaccgcggcctgcttctgctcgcccagatgtcgtccaagggctgcctcatgaccaaggagtacacccaggcctgcgtcgaggccgcgcgcgagcataaggattttgtcatgggcttcgtctcacaggagtcgctcaactcggccccggacgacactttcatccacatgacccccggatgcaagcttccgccgccaggcgaggacgaagagagcggccagatcgagggcgacggcctcggccagcagtacaactcgcccagcaagttgatcaacatttgcggcaccgacattgtcatcgtagggcgtggcatcaccgccgccggcgacccgccctccgaggctgagaggtacaggagaaaagcctggaaggcctatctggcgcgtctggcgtga

SEQ ID NO: 4859 - protein, 394 aa, Myceliophthora thermophilia
MADRHPTLSQSFAERAKTASHPLTRYLFRLMDLKASNLCLSADVSTARELLTLADRVGPSIVVLKTHYDLISGWDYNPQTGTGAKLAALARKHGFLIFEDRKFVDIGKTVQMQYTAGTARIIEWAHITNANIDAGKDMVRAMAEAAAKWKERINYEVKTSVTVGTPVSDQFDDAEEQAQWPQHQQHQHQHQHQQQRDEKGGPRRLGTREEQHQQDNGDGDGRKGSIVSITTVTQSFEPAHSPRLSKSNELGDDAVFPGIEEAPVDRGLLLLAQMSSKGCLMTKEYTQACVEAAREHKDFVMGFVSQESLNSAPDDTFIHMTPGCKLPPPGEDEESGQIEGDGLGQQYNSPSKLINICGTDIVIVGRGITAAGDPPSEAERYRRKAWKAYLARLA

SEQ ID NO: 4860 - DNA, 1497 bp, Myceliophthora thermophilia
atgtcggacgagaagccgcccccctccgacctggaagtgggcgaattggcgcctcagcagactgattcgctccacgatgggtctccccagcagagccctgccgcgcctaactacacgcgcaggcaggaggcccgcgttgtcatgaagttggattggaacctcatgacgctgttcttcgccttgtatatgctcgccttcctcgaccgaggaaacatcggcaatgccaggatcgcgggcatggcgaaggatctcgccctggacacaaaccgctacaactggctgctcaacatgttctacattacatatgtcatcgccgagtttagcgtcttactgtggaaggtcttcccgccgcacatcgtcggaagccttgttgttttcagctggggactgattgccacggtgcaagccggtgtgcagagctgggggggcgagatggctctgcggtttcttctcggcgccttcgaggcggcctacggaccgggcattatctatctcctgtccttcttctacctccggcacgagattggtttccgatgcggcatcttcgcctcagcggctcccttggcgtcgacctttgccggcgctctcgcctacggcatcaccagcggccactcgaagctcgccaactggcgcctgctctttctcgtcgagggcctgcccaccgttctcatgtccgtcattgcgttcttcttcatcccggactcccccgagaaggcccggttcgtcacgactgaggagagagccatcgttcggtctcggaccgtgcgccaagtcggcagcgtttccagcgagaggatcgggggggtgaagctcaaggacgtcctctccatcttcatcgaccccaaggcctggatgtgtgctctcatgtacttctgcggcaacgtcagctactccagccttcccgtcttcctgcccactatccttgaagacatgggctacaccgccatcaacgcacagggcctgtctgcacctccatcctttgccgccttcctgtttgccctgattaccacgtggattgccgacaagacgcagcagcgatgctttgtgctctttgttacctctgccatcggcggagtgggatatatcatccttgccacggtcgaaacagtcggggtccgctacttcgctaccttcctggcctctgccggtgtcttctcgaccattcccaacatcttggctcttaccttgaacaaccagggcaatgacacacgacgcggcatgtcaattgtcctcatcaatcttatcggccagtgcggcccgttcctgggaaccaacgtctttcccttggaagagaggccaaggtatatcaagggcatgagcatctgcgcctccttcatgttcttctcggccattctcgccctttcccagcgcgtcttactcatgtgggagaaccgtaagctcgaccgcaagtatggccctgtaaagaaggaaacggagggcaagtcggagagtgtggccgtggagaactatggaccgaacttccgatatgttctctga

SEQ ID NO: 4861 - protein, 498 aa, Myceliophthora thermophilia
MSDEKPPPSDLEVGELAPQQTDSLHDGSPQQSPAAPNYTRRQEARVVMKLDWNLMTLFFALYMLAFLDRGNIGNARIAGMAKDLALDTNRYNWLLNMFYITYVIAEFSVLLWKVFPPHIVGSLVVFSWGLIATVQAGVQSWGGEMALRFLLGAFEAAYGPGIIYLLSFFYLRHEIGFRCGIFASAAPLASTFAGALAYGITSGHSKLANWRLLFLVEGLPTVLMSVIAFFFIPDSPEKARFVTTEERAIVRSRTVRQVGSVSSERIGGVKLKDVLSIFIDPKAWMCALMYFCGNVSYSSLPVFLPTILEDMGYTAINAQGLSAPPSFAAFLFALITTWIADKTQQRCFVLFVTSAIGGVGYIILATVETVGVRYFATFLASAGVFSTIPNILALTLNNQGNDTRRGMSIVLINLIGQCGPFLGTNVFPLEERPRYIKGMSICASFMFFSAILALSQRVLLMWENRKLDRKYGPVKKETEGKSESVAVENYGPNFRYVL

SEQ ID NO: 4862 - DNA, 777 bp, Myceliophthora thermophilia
atgtccgactctcccaagatcctcattgtcctgacctcccacgacaagctgggcgataccggcaagcccacgggctgtaacccactaacattttccctctcaccttcccccctccctcgaaaacagtccgaactagcccacccttacagcgtgttcgcgtcccacggcttcaccatcacgttggcctcgcccgccggggggccggcaccgctggacccgtcgtcgatcgaggccgccgccgcctcgtcggacgccgtctcgcagtcgttcctggccgagcagagggcgctctgggagtcgacggagccgctcgcctcgttcgtgggccgcgccgccgagttcgccgccgtcttcttcccgggcggccacggccccatgttcgacctggcgaccgacccgacctcgcaggcgctcgtgcgcgagttcgccgccgccggcaaggtgctcgccgccgtgtgccacggccccgcggcgctggccaacgtgcgcacgggcggcgacgacgccggccaggccggcgagttcctgctccggggcaggagggtgacgggcttcaccaacgccgaggaggccgcggtcgggctcgacagggccgtgcccttcctgctggaggaccgcctgcgggagctggtcggcagcgagggcgcgttcgagaaggcggacgccgattggggggagaaggtggtggtggacgggaagctgatcacgggccagaacccggccagcgccacggcccttgccgaggcgattgtgcgggctgttttggggagcgcctga

SEQ ID NO: 4863 - protein, 258 aa, Myceliophthora thermophilia
MSDSPKILIVLTSHDKLGDTGKPTGCNPLTFSLSPSPLPRKQSELAHPYSVFASHGFTITLASPAGGPAPLDPSSIEAAAASSDAVSQSFLAEQRALWESTEPLASFVGRAAEFAAVFFPGGHGPMFDLATDPTSQALVREFAAAGKVLAAVCHGPAALANVRTGGDDAGQAGEFLLRGRRVTGFTNAEEAAVGLDRAVPFLLEDRLRELVGSEGAFEKADADWGEKVVVDGKLITGQNPASATALAEAIVRAVLGSA

SEQ ID NO: 4864 - DNA, 1932 bp, Myceliophthora thermophilia
atggcctcgcgccgccatcatcgcttcccgcggggcgagacgtgttccgagtgtccggccaggagatggtactccgagaatggccggcgctattgtgagaatggtcatgaagtcgaaggctacgtccagttcgacgtcgacgaggacgacaactacggcaagacgggcagcgtggctcgcaagaagaaggaggcccgccacgccgaccgcaagcatctgacgggcaacgcggcccgcgagctgtacctcgagtgcctgcagctcctgctccggaagcaggtgctctggctggtgcggaagaaggggttccatcccgagctcgaggccgtcgtccgcgacctgtggctgctccggatcaggacgtttccggggctcgagggggaccgccagtcgggcaaggacggggaccggaagggtgacggcgggctggtcatgtttagctcgcagacccggggccagagcgacgaggaagagggcgaggagggaggaggcgacggagaggggttcgggtggaagaggaagaggaatagctgggccggggacgtctgggcgcttcctggggcgctggacacgctcgtgttggtgtatctgggatgcgtcctgcggcaggagccggtacggcttggggacgtgtttcggtgggcgaggaatgggcagatgccgttcctcggagcgctcaaccatgtgcccaaggattggcgggaccggttgcccggctgggcacatcattctctcctgacaagatatgccagatttcacggtggcgaactgcaccgggctgtcatggacatgatgctgggttataaagagaaccacgggctagagttccctgccgtaccggcaccgcctttgctgtttctctacataagggatctggccctgcctcctgaagtgtatcctttcgcacagaaaatctgccatctcctgaagctgcgattttcatttccggcacgagatcccgcccccaagcggtacaggctgcttgacctaccagaggtgctactagtggcgtcccttgtcgtagccacgaagcatcaatatccgctcgacgagacggtgcggttacctcgacacgccaatgacccgctctgtcttcagatggactggaaggtgtgggaatcggagttcagaaagcggccggaggagaagccagggatactgagatacgagcacacggatccgcaagagatatggtccatgggcaaagaagatataaacgagctgctgaactggtttcaggagacgcagctcgataagaatctgaaagatgaaaccgaagccgaccgcctcttcccacttcaagctattccagtgctcccagccataccggaagtgcctcaagaagagattgaggcccgagccaaaagagttctgagcgccatgaaacgggttaacccacagccagattcggaggaaagggctgaggagatcaagcgactgggctccgattacaggtgctataagaacgtcgacgagcttgatgggattatcttcgtgaagaccctcacgggtaagaccattaccctcgaggtcgaggccgccgacaccatcgagaatgtgaagtcgaagattcaggacaaggagggcatcccccccgaccagcagcgcctgatcttcgctggcaagcagctcgaggatggccgcactctctctgactacaacatccagaagaggaggcactcgttctcggattttgggggagatgttgaaccgatccgcggcaccgacttggacgagtcgaccctccacctcgtcctccgcctccgtggtggtatcattgagccctcgctcaaggctcttgcctccaagtacaactgcgataagcagatctgccgcaagtgctacgcccgtctcccgcctcgtgcgaccaactgccggaagcgcaagtgcggacacagcaaccagctccgccccaagaagaagctcaaataa

SEQ ID NO: 4865 - protein, 643 aa, Myceliophthora thermophilia
MASRRHHRFPRGETCSECPARRWYSENGRRYCENGHEVEGYVQFDVDEDDNYGKTGSVARKKKEARHADRKHLTGNAARELYLECLQLLLRKQVLWLVRKKGFHPELEAVVRDLWLLRIRTFPGLEGDRQSGKDGDRKGDGGLVMFSSQTRGQSDEEEGEEGGGDGEGFGWKRKRNSWAGDVWALPGALDTLVLVYLGCVLRQEPVRLGDVFRWARNGQMPFLGALNHVPKDWRDRLPGWAHHSLLTRYARFHGGELHRAVMDMMLGYKENHGLEFPAVPAPPLLFLYIRDLALPPEVYPFAQKICHLLKLRFSFPARDPAPKRYRLLDLPEVLLVASLVVATKHQYPLDETVRLPRHANDPLCLQMDWKVWESEFRKRPEEKPGILRYEHTDPQEIWSMGKEDINELLNWFQETQLDKNLKDETEADRLFPLQAIPVLPAIPEVPQEEIEARAKRVLSAMKRVNPQPDSEERAEEIKRLGSDYRCYKNVDELDGIIFVKTLTGKTITLEVEAADTIENVKSKIQDKEGIPPDQQRLIFAGKQLEDGRTLSDYNIQKRRHSFSDFGGDVEPIRGTDLDESTLHLVLRLRGGIIEPSLKALASKYNCDKQICRKCYARLPPRATNCRKRKCGHSNQLRPKKKLK

SEQ ID NO: 4866 - DNA, 1809 bp, Myceliophthora thermophilia
atgccgcgattgtccaacatcaaaactgcccttcgtcggccgtcggcggaggaggagaagcgcgccgatcccaccgtcgtcgacgcttcctttgagaggacagacaaggaggccgtggccgacaacgccgcccctgtcaacaacgatggcggtgacacatcgtcatcagaccttcccgcaaaggacgcgcagcgcggcgtgcaagaagttgaggccgtgacaatgagctggtccaaagcggctctgattggcgtcttcctgaacatctggttgctatacttcgtcaatgcctttcagagcgccatcctcaacagtctgacgccctatgtgacgagtgattttgaatcccactcgctgctcaatgttatcgacatcgtcgctggttccatgacagccgccgtcttcatccctctctccaagattctggatatctggggcagagccgaggggtttgtcatcatggtcgtctttgctacactagggctggttctcatggccgcttgcgacggactcgccatgttctgtgctgcaaatgtcttctacaaggtcggcttcaccggcatgacctactctatcgacgtgatcaccgccgattcttcccaactgaagaaccgtggcctggcttatgccttcacctcctcgccctacatcattacagccttcgctggccctaaggctgccgaggatttcctggaacacgtcaactggaggtggggcttcggttgcttttccatcatcttcccggtcgttgccgctcccttgttttttgttctcaagtaccaccgtcacaaggcccggaagcaaggcctgcttgtcaaagaaaagagcggccgcacatggatccagtccatctggcactacgttgtccagtttgatgcgctcggagtctttttgttttccgccggactgaccgtatttcttctgccgttcacccttgctggccaggcgccaaacggctggggctcggactatatcattgccatgattgtcgtcggcttcgttcttctctgcgccttcgggctttacgagtccttctgggccccggtccccatgatcacctacaagatgctggccgatcggaccgtgatcggcacctgcatgctcagcatcagctaccaggtctcctactactgctgggccaactacttcagctccttcctccaggccgtcaacgacctcaccgtgtctcagagcggctacatcgacaacacgttcagcgtcgtctcgggcgtcctcctcttcatcgtcggattcctgatccgcaagacgagccatttcaagtggttgctgtacattgcagtacccctctacactttcgcccaaggcctgatgatttacttccgccgcccggaccagtccgttggctacctcatcatgtgcgaagttttcatctccatcgccggcagcaccttcatcatcgtcatgcaggtcgccatgctcgcagctgtcgatcatcagcacgtcgccgccgcgctctccctgctgaacgtcgtcggcaccaccggctatgccgtcggcgctaccatttcgggtaccatctggacaaacactttccggaaagctctgattcggtacttgcctgaatcggcgctgccccagctcgacgagatatatgagcaacttgatgtccagctttcatttgcggacggaactcctatcaggcgagccatccaggaagcctatggttacgcccagacacggatgctcgctgccggcacctcggtaatggctgtgacttttgttggtgtgctattgatgcggaacatcaacgttgccaaggttgcgcaggtcaagggcgtggttttctaa

SEQ ID NO: 4867 - protein, 602 aa, Myceliophthora thermophilia
MPRLSNIKTALRRPSAEEEKRADPTVVDASFERTDKEAVADNAAPVNNDGGDTSSSDLPAKDAQRGVQEVEAVTMSWSKAALIGVFLNIWLLYFVNAFQSAILNSLTPYVTSDFESHSLLNVIDIVAGSMTAAVFIPLSKILDIWGRAEGFVIMVVFATLGLVLMAACDGLAMFCAANVFYKVGFTGMTYSIDVITADSSQLKNRGLAYAFTSSPYIITAFAGPKAAEDFLEHVNWRWGFGCFSIIFPVVAAPLFFVLKYHRHKARKQGLLVKEKSGRTWIQSIWHYVVQFDALGVFLFSAGLTVFLLPFTLAGQAPNGWGSDYIIAMIVVGFVLLCAFGLYESFWAPVPMITYKMLADRTVIGTCMLSISYQVSYYCWANYFSSFLQAVNDLTVSQSGYIDNTFSVVSGVLLFIVGFLIRKTSHFKWLLYIAVPLYTFAQGLMIYFRRPDQSVGYLIMCEVFISIAGSTFIIVMQVAMLAAVDHQHVAAALSLLNVVGTTGYAVGATISGTIWTNTFRKALIRYLPESALPQLDEIYEQLDVQLSFADGTPIRRAIQEAYGYAQTRMLAAGTSVMAVTFVGVLLMRNINVAKVAQVKGVVF

SEQ ID NO: 4868 - DNA, 906 bp, Myceliophthora thermophilia
atggcgcagatgcgaggaccgggtagctacggcatcgccgcgccgagtccattcggcgggccgaccgacgacaagtcagcgcagagcccgctcgaggcgatccgcgagcagacgagcaagatcgaggacctgatggacaccgtgagcgagccgatcaagccctacttgcccgccatcggccgcttcctgatcgttgtgaccttcatcgaagacgccatcagaataataacacaatggactgaccagctgctctatctgcacgactaccgccacatcccctccggcctgacgcacctgttcctcatcctcaacgtgatcgccatggtgacgtgctcgaccctggtcatcattcgcaagcactccgagtacgccgtgggcgggctgatcgccgtcgtcatcacgcaggcgctcggctacggcctcatcttcgatctcaacttcttcctgcgcaacctctccgtcatgggcggcctcctgatggtgctctccgactcgtgggtgcgcaagaccaaggccttcgccggcctgccccagctcgaggagaaggaccgcaagatgtacttccagctcgccggccgcgtcctgctcatcttcctgttcatcggctttgtcttcagcggccagtggtccatctggcgcgtcctggtctcgcttgtcggtctggtggcctgcgtcatggtggtcgtcgggttcaaggccaagttcagtgccaccctgttggtcgtcattctgagcgtcttcaacgtactggtcaacaacttctggacgcttcatgagcatcacccgcacaaggactttgccaagtacgacttcttccagatcctctccatcgtcggcggtctcctcctcctcgtcaacagcggccctggccagttcagcatcgacgagaagaagaaggtttactaa

SEQ ID NO: 4869 - protein, 301 aa, Myceliophthora thermophilia
MAQMRGPGSYGIAAPSPFGGPTDDKSAQSPLEAIREQTSKIEDLMDTVSEPIKPYLPAIGRFLIVVTFIEDAIRIITQWTDQLLYLHDYRHIPSGLTHLFLILNVIAMVTCSTLVIIRKHSEYAVGGLIAVVITQALGYGLIFDLNFFLRNLSVMGGLLMVLSDSWVRKTKAFAGLPQLEEKDRKMYFQLAGRVLLIFLFIGFVFSGQWSIWRVLVSLVGLVACVMVVVGFKAKFSATLLVVILSVFNVLVNNFWTLHEHHPHKDFAKYDFFQILSIVGGLLLLVNSGPGQFSIDEKKKVY

SEQ ID NO: 4870 - DNA, 333 bp, Myceliophthora thermophilia
atggcgaaggagactgagaggactggcctcgcacggggtctcaacaagggtcacaagacgacggcgcgcgtcaacaagccccggccgtcgaggcagaagggcaagctgagcaaccggacccagtttgttcgatcgctcgtcaaggaggttgttgggctcgcgccctatgagcgccgcgtgattgaactgcttcgcaacggcaaggacaagcgcgcgcgcaaattcgccaagaagaaggcaagtagatgccttggcacgttcaaccgggccaaggtcaagatcgaggagctccagcgtatcattaccgaatctcgcagggctggtggtcactga

SEQ ID NO: 4871 - protein, 110 aa, Myceliophthora thermophilia
MAKETERTGLARGLNKGHKTTARVNKPRPSRQKGKLSNRTQFVRSLVKEVVGLAPYERRVIELLRNGKDKRARKFAKKKASRCLGTFNRAKVKIEELQRIITESRRAGGH

SEQ ID NO: 4872 - DNA, 1464 bp, Myceliophthora thermophilia
atggagaaagaaatggaaaaaaatgtctacatctccgaatccgaccagaccgatggcgagctgatcggccagtcgccaacagatgataacacgaccgatgaaaagacgaagatagccacttccaacggtatcaccggcacagctcgcccagatgtcgctgaagctgccaccaagacggaaggaggagaagcggtagtagcagagggtgcagctaatactactgctgctgctactactgccgcccccacagcggacacggtacccgatggagggcttgtggcgtggctgcaggtcgtcgggtcagtagccatcctggtcaacacttggggcgtcatcaacacattcggcgtgttccaggcgtactacgaagcggagctgctcagggaccactcgtcgtctgaaatctcgtggatcgggtcgacccaggcggccctgctctttgtggttggcgtcttcgccgggccgctctacgacgccggcttcttccggcacctgctgatcacgggcctgttcctcatcgtgctcgggcagttcatgacgtcgctgtgcacggcctactggcaggtgatgctggcgcaggggatcgcgatggggatcggcatgggcatgaccttcctgccgtcggcggccatcataagccagtacttcttgcggcaccgggcgctagcgctcggcctgtcgagcgccggctcgcccgtcgccggcgtcgtcttccccatcctcttcgaccggctgcaacggcgcgccgggttcggctgggcgacgcgcgccatcgccttcatcctgctgggcatgtcggcgatccccatcgcctgcatgcgcacgcggctgcccccctcggcgaggcggaggtcgctcatcgaccggagcgccctgcgcgacgtgccgtacgtgctgtacgtcgtgggcggcgtcttcgccttcctgacgctgtacgtgaccttcttttacatcacgctgtttgcgacctcgcgccacgtcgcgagcgacagcttcgccccctacctagtcacgctgctcaacgccggatcggttttggggcgcatcatcccgaacgcgctggccgaccgctacgggtcgatgaacctgatgatcgtgtgcaactttgtctgtgccgtcttggcgtttagctggctgggcatccgtaacctcggcggggccgtggtctacgcgctgctctacggcgccttttctggcggcgtggtcagcctcatgccgagcgtcattgtcgggctctcgccggatatggggcgcgtgggtgctcgattgggcatggcctttctggtcatgggcatcgcgatccttgtggggaccccgattgccggggcgatcctggggagcgaggagaatcccgagtggttgggtaccaggttatattccgcgtttgggctcctcgtggccacggccttgttctgcacctcgagggtcctggtgtttaagcggaagaggggctggaaggcttga

SEQ ID NO: 4873 - protein, 487 aa, Myceliophthora thermophilia
MEKEMEKNVYISESDQTDGELIGQSPTDDNTTDEKTKIATSNGITGTARPDVAEAATKTEGGEAVVAEGAANTTAAATTAAPTADTVPDGGLVAWLQVVGSVAILVNTWGVINTFGVFQAYYEAELLRDHSSSEISWIGSTQAALLFVVGVFAGPLYDAGFFRHLLITGLFLIVLGQFMTSLCTAYWQVMLAQGIAMGIGMGMTFLPSAAIISQYFLRHRALALGLSSAGSPVAGVVFPILFDRLQRRAGFGWATRAIAFILLGMSAIPIACMRTRLPPSARRRSLIDRSALRDVPYVLYVVGGVFAFLTLYVTFFYITLFATSRHVASDSFAPYLVTLLNAGSVLGRIIPNALADRYGSMNLMIVCNFVCAVLAFSWLGIRNLGGAVVYALLYGAFSGGVVSLMPSVIVGLSPDMGRVGARLGMAFLVMGIAILVGTPIAGAILGSEENPEWLGTRLYSAFGLLVATALFCTSRVLVFKRKRGWKA

SEQ ID NO: 4874 - DNA, 1719 bp, Myceliophthora thermophilia
atgccgctgggtatactcgaggatcgcaagctcgagcatgtcccgggtacctcgcccctcaacgagctggggaggagggacctggacgcggagcttgcgggcgtcgccgtcgactcgcgcatgctcaagcacgacaagaccggccaggtcgtcctcgtgccgcagccatccgactcgcccaacgacccttacaactggccgcgctggaagaagatgttcaccgtcgctattgcctatgggtgcggatgcgtaggcgctgtcggccccctcccgacgcccgccatcgtacccctcgctgagcaatggggcatcccgctgcagaccttcaccctgggatgccagggcagctgcatagccgccatcgccgtgggctcgttgctctgcaatacccttgcggtcaaggtgggaaaacgtcccatctacattctcacatccatcggcctgatggtgtcgtgcttctgggctgccgaggccaagagctttggcagtctggcagccgcgcgcgcgattcagggcttctgcatggcgcccatggaggcgctggtcccggcgagtatcagcgatatatggttcttgcacgagagaggtctgcgcaatgccgtcttcaacctcggtgtgctgggtggtattaatcttgccagccctattgccggcgcggtgatccaatacggttcattccggatagccttccatgtcatgggcgcttcatttgcccttcagctccttttaacggttctcttcatgcccgagtccgcgtaccacagatccggcacaatcaacatagacacgggtgccgcggcgagggaagtagtatcggatgacagtcaggaaaagaacaaaaccggactggaacaccaagaagtctcgtcgacgcctcgggcaagcgaccgctcgcccgagcccaagaagtcctgggctagggagctgctgccgtacgatgggtactgggacagcacttcgttttggcgcacgcttctccgccctttctcgctgctggcgtcgccgatggtgtgctgggcgacgctgctcttcacaacgtgcatctcgtggctggtcctgatctccatcacgctgtcacaaatcttctcggcaccgccatacaacttctctgtcgccgcggtgggcgcgtccaacgtgtcgagctttgtggcaactctaattgcaaccgctgtggccggaccgctgattgacggggtcgcgaagtggatgttgaagttgaatgggggtatctttggtatgtcgattcgatgcctcgacttccacttcaagcccgaggcctcgatatggggacagcccgaattccgcctgcccatcatggtgacctacctcgtcttcacggccactggcttcttcgcctggggcgagagcctgtacaagcaagaaccttggccggtccccgtcatcgtctgcatgggcttgatcaacttcggagtgcagctcggcacgtcggccgttgtcacatacgtgacagactgccaccggaggcaggcggctgaggcgtttgcgctcatgaactttgtcaagaacatgtttgcgttcggtttgaccttctattgcaatgactggatcgcagtccaaggagtgaggaactgctttttcgtcatagggtcgataactattggcgtcactctcacctcaatctttatgtatatctgggggaagaaggcgaggtcgtggacataccgtgttgcgcatgcgaagggctggaagttgggatag

SEQ ID NO: 4875 - protein, 572 aa, Myceliophthora thermophilia
MPLGILEDRKLEHVPGTSPLNELGRRDLDAELAGVAVDSRMLKHDKTGQVVLVPQPSDSPNDPYNWPRWKKMFTVAIAYGCGCVGAVGPLPTPAIVPLAEQWGIPLQTFTLGCQGSCIAAIAVGSLLCNTLAVKVGKRPIYILTSIGLMVSCFWAAEAKSFGSLAAARAIQGFCMAPMEALVPASISDIWFLHERGLRNAVFNLGVLGGINLASPIAGAVIQYGSFRIAFHVMGASFALQLLLTVLFMPESAYHRSGTINIDTGAAAREVVSDDSQEKNKTGLEHQEVSSTPRASDRSPEPKKSWARELLPYDGYWDSTSFWRTLLRPFSLLASPMVCWATLLFTTCISWLVLISITLSQIFSAPPYNFSVAAVGASNVSSFVATLIATAVAGPLIDGVAKWMLKLNGGIFGMSIRCLDFHFKPEASIWGQPEFRLPIMVTYLVFTATGFFAWGESLYKQEPWPVPVIVCMGLINFGVQLGTSAVVTYVTDCHRRQAAEAFALMNFVKNMFAFGLTFYCNDWIAVQGVRNCFFVIGSITIGVTLTSIFMYIWGKKARSWTYRVAHAKGWKLG

SEQ ID NO: 4876 - DNA, 4515 bp, Myceliophthora thermophilia
atggcgacgaccgcggccgccaacgagctcaagcagcagggcgctatcgaagcttcgcgagaccccaacagcaatgtgaccgccgaggatgccgaacgcaggattgttgaggacagcatgggggcaggagtgacagccttcaccttcgaccctgatgctagcccagaagagaagaaagcccaggcaagagaggcgatccccgagggtttccaccacaggcccaaaggcgtcgcgatcgtgagcgatatcgacggcggaaccacggccgatgtcgacctgccatctccctccaaagccggagcggtcgaggtcgtcaaggacgagagcgggaagctagttgcggatggccaggccatcgaggaagagttcgattggagcaaagcaggttgggctccgaggttcggttggcctgacgagcccgccgacgagggcgaggacatgctggaccattcgacctgggtcgagtcgcaattgtccgagaagttctttggagattggtaccacaacgcggcggtcattgcctttgcatgtctctcctcatggctagtggccgtgctgggcggcggtctcgcctgggtcttcatcatcatggccatctgcgcgacgtattaccgcacctcgatccgccgagtccgtcggaactttcgggacgacataacccgcgaattgtctctcaagaagctcgagacagacaatgagtccgtcgagtggatcaactccttcttggtcaagttctggcccatctaccagcccgttctcgcccaaaccgtgatcaacacggtcgaccaggtcctgagcaacgccacgccggccttcctggacagcctcaagctcaagtccttcaccctgggctcgaagccgccacggatggagcacgtcaagacgtaccccaaggccgaggacgatgtcgtgataatggattggatgttcagcttcacccccaatgacacggctgatatgacggcgcgccaaatcaagaacaaggtcaatcccaaggtcatcctggagattagggtcggcaagtccatggtcagcaaaggcctggatgtgatcgtcgaggatatggccttcaccggtctgatgcgcctcaagatcaaactgcagattcccttccctcacgtcgagaagatcgagatgagcttcctagaacggcccactatcgactacgtctgcaagccgctgggaggcgagacgtttggtttcgacatcaactttatccccggccttgagaagttcatcatggagcagatccacgggaccctcgccccgatgatgtacgcgccaaacgtgttcccgatcgaggtcgccaagatgctggccggcacgcccgtcgaccaggctatcggtgtgattgccatcacgctgcatggcgcccaggggctgaagaacaccgacaagtttgccggcacacccgatccatatgctgtggtttccctcaacaagagacagccgctcgcgcagaccaaagtggtcaaggagaacgccaaccctcgctggaacgagacgcactacgtcatcatcacctcgttcaacgattccctggacattgaagttttcgattacaacgacatccgcaaggacaagaaacttggctccgcatctttcgcgttggaaaacgtggaggaagtgtacgatcacgagaacgagaggctggaactcaagcatgacggtaaggcgaggggtgtcgtgcttgccgacatccgtttcttcccggtcttggaacccagggagggtgaagacggagccgcggaacctgccccggagtcaaaccagggtatcctgcgctttactgtcgagcaagccaaggagctagatggatcgaagagcctggtcggcttgctcaacccgtacgccatgcttctcctgaacggcaaggaggtacacactacaaagaaactcaagcggaccaacaacccgatctgggacaacgggtccaaggagatcctgatcacggacaagaagaacgccaagctcggcgtggccatcaaggacgaccgtgacatcgctggcgaccagctcgttggaacgtatcagatcaaactcgaggacatgctcgaactcatggccaagggccgggagtggtacaacctcgccggagtcaaaaccggccgcgtcaagatgatggcccaatggagaccggtagcgattgcgggtatcgcaaccggcactggcggttacaggaccccaatcggcgtcttgcgggttcacttcaagtacgccaggcagctccggaacgtggaggccctcggcaagtccgacccgtatgcccggattgtcagtgcgggcatcgaaaggggcaggacagtcacattcaagaacaacctcgaccctgactgggacgaggtgctctatattcccctccagagtccgaagggacgtatgcagctcgaggtcatggacgccgagaatgtaggaaaggatcgcagcctcgggctcaccgagatcgacaaggccgactacgtgatccaaggcgagaacggcgagtggctcgtgcacgacgagaaggtcgagcatcacgacgggttgcgcatgcacggtaagggaacggcaaagggcgtgctgacgtacaccgtggccttctacccgactctcaatgtcgcggacccggaggaggaagaagagaaggagaaagaaaaggaaaaaggggacgaaaagcagcaagagcaagagaacgggcaggaaaagaaggaagccgggagcgacaaggacaagtcttccctgagcaggccgtcgctcgacgcgagggcgtctgtcaggcagtccctggacgtgaggtccaacgacgggaaagagctcagtgcgccggcgacgccaaccagtcctacgtccgttatctcccctaggaggtcgcgcgatgagagggaaccccccaaggtgtacctcacgcctgaggaactgctcaggcacgactgtggcgtcgtcatcttccgtctcatggaggcggaacttcccaggagccagtgccgcatcgaggtctacgtcgacgacatggccttcccctcctatgtctcctcgacggcaaagtcacggaataacaagtttgacgagattggtgactgcttcatccgcgagctggagttctcgaaattgaccatcgtggtcaccgagaaaggagacaagcacgacgatgctcacgagaagcgcgcgctagctcgtttgtctggcaacacgctcgacactctgaagcagtgcctgaacaaccctacggttctcaagatgaggggtgaagacggcgaaatgtactcggtgagagtcagcctcaagtacgtcccggtcaggatgcaactcgacccgagcgaaagcatcaacaacatgggcaacctccgagtcgacgttctggatgcccaagatctcccggctgccgactccaatggcaagagcgaccccttcgtcaggttcgaactcaacggccaggaggttttcaagaccaagacgcagaagaagacgctgaacccaacgtggggcgaggtgttcaacgtgtcgattccttcccggaccgccgccaagttccgggccacggtgtgggactgggactttgccgacaagcccgactacctcggaggcgtcgatatcaacttggcccagctcgagtctttccgagcgcaggagttcaggtacgtgttggatggcaaatcgggcgtgctccgtgtccgcatgctctttactcccgactacgtgacccgcacgagacaggggacatcgaccctggcggggacattttcggtgccaaccaggatcgtgaccggcgttgccggcgttcctatcaagggcggcgtggcagtggccggggcggttggtcatggcgtgggcaagggagcctcgttcctcttccgcgggatacgcggcaagaaggacgacgacagcggcagcgagtcggaccggaactcggtcgatgttccgcggatcgtcacgagcggaggcgcggacgaaacaagcaacggtgcggccgccgacggcagcgtgtccccggggcgccacagccgcaccaagagcgtgggcgcctcgtcgatccacagcgccatcgttcccggcgcggcatcgggcacggcctcgttcaccatcatctcggcctcgggcttcccgccgtcggccgacgtgtacgtggtcgtcacccagctgcgggacggcaagtcgaagcaggtcggaaagaccaagcaccgcaagtcgtcgagcggcacggtcaagttcgacgagacgttccgcatccagtgcacgccggacgcgcagttcaaggtcgaggccaaggagcaccacacgtttggcagcgacgacgcgctcggagagactctgtactttgtggacgactccaacacgggcatggagaggacgctggcggtggggagcggcacggtcgtcatcaagagctcgtttacgccgtcggaggacggtggtggcagcaggctgatcccggatagccccaagtcgaccaagtccatcgccggcggggttaggcggagcatcttgaacaagcgggagctgaggctgccgagccgggatggagcgcctccttcttag

SEQ ID NO: 4877 - protein, 1504 aa, Myceliophthora thermophilia
MATTAAANELKQQGAIEASRDPNSNVTAEDAERRIVEDSMGAGVTAFTFDPDASPEEKKAQAREAIPEGFHHRPKGVAIVSDIDGGTTADVDLPSPSKAGAVEVVKDESGKLVADGQAIEEEFDWSKAGWAPRFGWPDEPADEGEDMLDHSTWVESQLSEKFFGDWYHNAAVIAFACLSSWLVAVLGGGLAWVFIIMAICATYYRTSIRRVRRNFRDDITRELSLKKLETDNESVEWINSFLVKFWPIYQPVLAQTVINTVDQVLSNATPAFLDSLKLKSFTLGSKPPRMEHVKTYPKAEDDVVIMDWMFSFTPNDTADMTARQIKNKVNPKVILEIRVGKSMVSKGLDVIVEDMAFTGLMRLKIKLQIPFPHVEKIEMSFLERPTIDYVCKPLGGETFGFDINFIPGLEKFIMEQIHGTLAPMMYAPNVFPIEVAKMLAGTPVDQAIGVIAITLHGAQGLKNTDKFAGTPDPYAVVSLNKRQPLAQTKVVKENANPRWNETHYVIITSFNDSLDIEVFDYNDIRKDKKLGSASFALENVEEVYDHENERLELKHDGKARGVVLADIRFFPVLEPREGEDGAAEPAPESNQGILRFTVEQAKELDGSKSLVGLLNPYAMLLLNGKEVHTTKKLKRTNNPIWDNGSKEILITDKKNAKLGVAIKDDRDIAGDQLVGTYQIKLEDMLELMAKGREWYNLAGVKTGRVKMMAQWRPVAIAGIATGTGGYRTPIGVLRVHFKYARQLRNVEALGKSDPYARIVSAGIERGRTVTFKNNLDPDWDEVLYIPLQSPKGRMQLEVMDAENVGKDRSLGLTEIDKADYVIQGENGEWLVHDEKVEHHDGLRMHGKGTAKGVLTYTVAFYPTLNVADPEEEEEKEKEKEKGDEKQQEQENGQEKKEAGSDKDKSSLSRPSLDARASVRQSLDVRSNDGKELSAPATPTSPTSVISPRRSRDEREPPKVYLTPEELLRHDCGVVIFRLMEAELPRSQCRIEVYVDDMAFPSYVSSTAKSRNNKFDEIGDCFIRELEFSKLTIVVTEKGDKHDDAHEKRALARLSGNTLDTLKQCLNNPTVLKMRGEDGEMYSVRVSLKYVPVRMQLDPSESINNMGNLRVDVLDAQDLPAADSNGKSDPFVRFELNGQEVFKTKTQKKTLNPTWGEVFNVSIPSRTAAKFRATVWDWDFADKPDYLGGVDINLAQLESFRAQEFRYVLDGKSGVLRVRMLFTPDYVTRTRQGTSTLAGTFSVPTRIVTGVAGVPIKGGVAVAGAVGHGVGKGASFLFRGIRGKKDDDSGSESDRNSVDVPRIVTSGGADETSNGAAADGSVSPGRHSRTKSVGASSIHSAIVPGAASGTASFTIISASGFPPSADVYVVVTQLRDGKSKQVGKTKHRKSSSGTVKFDETFRIQCTPDAQFKVEAKEHHTFGSDDALGETLYFVDDSNTGMERTLAVGSGTVVIKSSFTPSEDGGGSRLIPDSPKSTKSIAGGVRRSILNKRELRLPSRDGAPPS

SEQ ID NO: 4878 - DNA, 924 bp, Myceliophthora thermophilia
atggcgtcgaatctcgatgacgaaatcgaggagctgcaagcacgagctgccaccctcaaacggcatctccgtatccacgcctcaaccctcatcacagcgccctctacacgccaactgctctcaccagcaccacttgacaaacccaccactgccctcaccctacccacccacagcaaccaagatcaaccccaaaaagaaggtcaaacccgtcaagccctcctcaccgacgctctcgcacaacagcaagctcacgcccaacaatgcctctaccgcgcctgcgccaccctcaccaccttccgcgcgcgcgaccccgacccgcgcgctgtcgacggcggcgccatcttgggcctgcgcatcgaggtctttagccgctcccgcttcctacggccttactacgttctcctgaacaggccttttccgggcagccggcatctccgagtgcacaggcacaccctgccggcatgtattcccctggcgggtctcgcgtggcggtatctgcctcctccgaaaccctccaaggaaggggaagatggggggatggggagaggcaagaggaggcaggacctggcgaggtttgcgcgtgcgttgaggagggaggtggtacgatatcaccatcggcttggggtggtggccgatctgaggaaggcagccgggatcgggagggcgggacaaggagaggagggagacctcgagggcccgtcgaacaggttggtggaaatcgccccggccgatgccgaggtcaagcagctgactattgagtgggctgacgggcgtaccgggaggttggtcatgggcgacgacggggagattgtcaaactggtggtgctgggagagaatggctgggatcgtgaggcagggagggacttgctcggcggggcggttcgggtcgaggatgtagcgaagcgcttggcggcacttacatga

SEQ ID NO: 4879 - protein, 307 aa, Myceliophthora thermophilia
MASNLDDEIEELQARAATLKRHLRIHASTLITAPSTRQLLSPAPLDKPTTALTLPTHSNQDQPQKEGQTRQALLTDALAQQQAHAQQCLYRACATLTTFRARDPDPRAVDGGAILGLRIEVFSRSRFLRPYYVLLNRPFPGSRHLRVHRHTLPACIPLAGLAWRYLPPPKPSKEGEDGGMGRGKRRQDLARFARALRREVVRYHHRLGVVADLRKAAGIGRAGQGEEGDLEGPSNRLVEIAPADAEVKQLTIEWADGRTGRLVMGDDGEIVKLVVLGENGWDREAGRDLLGGAVRVEDVAKRLAALT

SEQ ID NO: 4880 - DNA, 1011 bp, Myceliophthora thermophilia
atggcaaccgacatggcagctcaattggcggctcagtcggtcgatccggtgatggccaaacttctcggccagaagtactggaaccacttcgctatccagctgggccattggaactccatgaaggtcatcattatggatgacgaaatgtttcgcatcatcccctttgcggtcaagatcgagcttgcgcaggagatgagcaagtatcttggcgaagacgtgatgttcgcgcgcgacgccgacaaccccaaggtttggattttaggccctaagaaaattatccgcccgcacgtcacgattgtcggcacaatccccatctgggatcccaagaaaaagcatatgccgccgccggagatcagggttcctcgacctccgaacgcctacattctctatcgcaaggataagcacaatgaggtcaaggctgaaaacccaaaccttcacaacaatgaaatctccgtcatcacgggagcgatgtggaagagtgagagccctgaggttcgggccaagtaccaccagaaagctcaggaagtcaaggcacaattcatggcgctgcatcccaactaccgctatgcacctcgtaagccgtctgagattcgccgccgggcgactcgtcgggcgtctgatgctcctgaaatccctcccattcagccttacttctctacgtcttcctcccctactcgtgctcagcctttcgagcacaacgctcatcacagcgctcaagtcaacaacgacaaggcaggcattatacctaacagcgacatcacccgtcgtatccccgccgctcagcgctttttgcctccggtcgtggagcccggctggaatccccttcatctgttgcctggcgccaatatacctaccgaacccacccttgcggatgaggttccggctgaggaggcccaaactccggctgatcaaggcactgccttgaatgccggccaataccccactatcgaggaactgattgacaactgggacatcgaggcggatctggctcagatgctgaacggaatctga

SEQ ID NO: 4881 - protein, 336 aa, Myceliophthora thermophilia
MATDMAAQLAAQSVDPVMAKLLGQKYWNHFAIQLGHWNSMKVIIMDDEMFRIIPFAVKIELAQEMSKYLGEDVMFARDADNPKVWILGPKKIIRPHVTIVGTIPIWDPKKKHMPPPEIRVPRPPNAYILYRKDKHNEVKAENPNLHNNEISVITGAMWKSESPEVRAKYHQKAQEVKAQFMALHPNYRYAPRKPSEIRRRATRRASDAPEIPPIQPYFSTSSSPTRAQPFEHNAHHSAQVNNDKAGIIPNSDITRRIPAAQRFLPPVVEPGWNPLHLLPGANIPTEPTLADEVPAEEAQTPADQGTALNAGQYPTIEELIDNWDIEADLAQMLNGI

SEQ ID NO: 4882 - DNA, 2709 bp, Myceliophthora thermophilia
atgaagacagatttcaagttctccaacttgctgggaacagtctactgccggggcaacctcctgttcagcccagacggcacccatctgttctctcccgtcggtaaccgagttaccgtcttcaacctcgtcgacaataagtcgtacaccctcccgtttgcccaccggaagaacatcgcgaggataggccttaccccgcaaggcaacctgctcctctcgatcgacgaagatggccaggcaatcttgacccacgtcccgcgtcgtgtggtcttgtaccacttttcctttaggtcgcatgtcacggcgctggctttctcgccatccggtcgctattttgtggttgggctggggaggaagatcgaggtctggcacgtcccctcgacacccgacacgaacgccgaaggcgacctcgagtttgcgccgttcgtccgccaccacactcacacacagcactttgacgatgtccggcatctcgaatggtcgagcgattctcggttcttcttgagcgcgtcgaaggatctgacggcgaggatatggagcttaaacccggagacagggttcacgcccacggtgctgtcgggtcataggcagggagtcgtcggtgcttggttctccaaagaccaggagacaatctggactgtgagcaaggatggagccttgttcgaatggcagtacacgacaaagccgggccgggacgaggatgagatgctagacgagtcggacatgcagtggaggatcgtcaacaggcattactttatgcagaacgccgcaaccctccggtgcgctgcctttcacgccgaatcgaacctgctcgtcgccggcttctcgaacggtatcttcgggctctacgaattgcccgatttcaacatgatccacacgctcagcatctcgcagaacgagatcgactttgtgacgatcaacaagagcggagagtggctggcctttggggcgtcgaaactgggccagctgttggtgtgggagtggcagtccgagtcgtacatcctgaaacagcagggccacttcgactccttgaatgcgctcgtttactcgccggacggccagcgcatcgtgacgacggcggacgacggcaagatcaaggtgtgggacattgagtccggtttctgcatagtgacgttcaccgagcacaccagcggtgtcacggcttgcgagtttgccaagaagggcaatgtccttttcactgctagcttggacgggtccgtccgggcgtgggacctcatcaggtacaggaatttcaggacgtttaccgctcccgagaggctctctttcacctgcatggcggtcgatcccagcggagaagtggttgctgcagggtcaatcgactcctttgacattcacatctggtccgtccagaccggccagctgcttgaccggctagccggccatgaagggcccgtgtcgtctctcgcgtttgccccgaacggcggcctcttggtcagcggcagctgggaccggacagccaggatctggtccatcttcagccgaacgcagacgagcgagccgcttcagctgcagtcggacgttctagacatcgcgttccggccggattcgctacagatcgccatttcgacgcttgacgggcagttatcattctggtccgtgtcggaagcccagcaggtctcgggcgttgacgggcgccgcgacgtttcaggagggcgcagaatcaccgatcgcagggcggctgcgaacgtggcgggtaccaagagcttcaacaccatccgttacagcatggacggatcttgcctcctggcgggcggaaacagcaaatatatctgcctatactctgtcacaaccatggtgctcctcaaaaagttcaccgtgagcgtcaacctgtcgctctcgggcacccaagagttcctcaacagcaagcggctcacagaagcagggcctgccgagctcctcgacgatcaaggcgaggcatcggacctggaggaccggattgacaggtcgctgcccggctccaaacggggtgacccttcggccagaaagaagaggccagaagtgagggtgaccggcgtggcgttctcgccaagcggctcgtccttctgtgccgcgtcaacagaaggtctcttgatctacagcctcgacagcaccgtgcagttcgacccgttcgacctgaacatggagatcacgcctgcttccaccctcgccgtgctggagaaggagagggattacctcaaggcgctggtcatggccttccgcctgaacgaggccggcctcatccagcgggtgttccaagcgatcccgtacacggagattggtctggtcgtcgagcagttccctaccgtgtacgtggcacggctgctgcgctatatcgccgcccagacggagcagtcgccgcatgtcgagttctgcctgctctggatcaaggcgctggtggacaagcacggcgcgtggctgacagccaaccggggcaaggtcgacgtggaactgcgcgtggttgcgagggcggtggccaagatgaaagacgagatcaggcgactggccgatgagaacgcttacatggtggattacctccttggacaagccagggacagcaagccggctggtggcgagcccggcgggtttgaggacctcgggatgaaggcattgccttcgacaacgaagcaggtcacgctaaacgatgtcatgcaggaagacgtgagtgaggaggaggaggaggaggaggaggaggagtggattgggctagactag

SEQ ID NO: 4883 - protein, 902 aa, Myceliophthora thermophilia
MKTDFKFSNLLGTVYCRGNLLFSPDGTHLFSPVGNRVTVFNLVDNKSYTLPFAHRKNIARIGLTPQGNLLLSIDEDGQAILTHVPRRVVLYHFSFRSHVTALAFSPSGRYFVVGLGRKIEVWHVPSTPDTNAEGDLEFAPFVRHHTHTQHFDDVRHLEWSSDSRFFLSASKDLTARIWSLNPETGFTPTVLSGHRQGVVGAWFSKDQETIWTVSKDGALFEWQYTTKPGRDEDEMLDESDMQWRIVNRHYFMQNAATLRCAAFHAESNLLVAGFSNGIFGLYELPDFNMIHTLSISQNEIDFVTINKSGEWLAFGASKLGQLLVWEWQSESYILKQQGHFDSLNALVYSPDGQRIVTTADDGKIKVWDIESGFCIVTFTEHTSGVTACEFAKKGNVLFTASLDGSVRAWDLIRYRNFRTFTAPERLSFTCMAVDPSGEVVAAGSIDSFDIHIWSVQTGQLLDRLAGHEGPVSSLAFAPNGGLLVSGSWDRTARIWSIFSRTQTSEPLQLQSDVLDIAFRPDSLQIAISTLDGQLSFWSVSEAQQVSGVDGRRDVSGGRRITDRRAAANVAGTKSFNTIRYSMDGSCLLAGGNSKYICLYSVTTMVLLKKFTVSVNLSLSGTQEFLNSKRLTEAGPAELLDDQGEASDLEDRIDRSLPGSKRGDPSARKKRPEVRVTGVAFSPSGSSFCAASTEGLLIYSLDSTVQFDPFDLNMEITPASTLAVLEKERDYLKALVMAFRLNEAGLIQRVFQAIPYTEIGLVVEQFPTVYVARLLRYIAAQTEQSPHVEFCLLWIKALVDKHGAWLTANRGKVDVELRVVARAVAKMKDEIRRLADENAYMVDYLLGQARDSKPAGGEPGGFEDLGMKALPSTTKQVTLNDVMQEDVSEEEEEEEEEEWIGLD

SEQ ID NO: 4884 - DNA, 600 bp, Myceliophthora thermophilia
atgccaactcccacagacggtgacgatgccatcgcctccgctgtgaaaagacagttgacccttgtctcgtcattccaaggatggttggctcgaaacatcggggccgacggagatcgcaatgacatcatcgccagggtccaaaagcggctagacagctaccggcagtggcttgatgctggacatgcgttggagaggccatctgaagattctgagccctggaccatgagcgttcaggttacctctgggagtgacgattcggagcatgtgatagtggtcactgggccaggatcgggtgatcctattcgaattatcgcaaaggatgactcggagctcaagtacctaatcagctgccacgcctttgccaaagcgcaggataccttgcgaacactacttcgcaccgtcagggaattagatgaagaaacatcccatctaagccaaccagcggaaattactgtccgaacatatattcgcagtctccaagagtacaacgacatcaaggatattggacaacagcttgtcggcctcatcgctgagaaccggggtgtcccagttcggtccctctacgaagcgggcgagtttggcctcagctttccacagtag

SEQ ID NO: 4885 - protein, 199 aa, Myceliophthora thermophilia
MPTPTDGDDAIASAVKRQLTLVSSFQGWLARNIGADGDRNDIIARVQKRLDSYRQWLDAGHALERPSEDSEPWTMSVQVTSGSDDSEHVIVVTGPGSGDPIRIIAKDDSELKYLISCHAFAKAQDTLRTLLRTVRELDEETSHLSQPAEITVRTYIRSLQEYNDIKDIGQQLVGLIAENRGVPVRSLYEAGEFGLSFPQ

SEQ ID NO: 4886 - DNA, 207 bp, Myceliophthora thermophilia
atggcccaaacaccgcagcaaaggagggcaaacctcaagttcgccaaggagaccgaagcgcgcatgggcaagtcggagagccaaatcaagaagcgggccaaggatacgcccaagtcgcccatttcccctttctggctcgctcttctcgccttcgtcgtgttcggcggcctcatctttgagatcatctcgcgcattttcttgcgataa

SEQ ID NO: 4887 - protein, 68 aa, Myceliophthora thermophilia
MAQTPQQRRANLKFAKETEARMGKSESQIKKRAKDTPKSPISPFWLALLAFVVFGGLIFEIISRIFLR

SEQ ID NO: 4888 - DNA, 837 bp, Myceliophthora thermophilia
atgtccgccatccagctctccttctctctccgcgtctcctcgggcgtcaagacggtccacctcctcggctcgtgggacaactacaccggccagctccctctctccaaggacaagagctcctccaagggcacctggaagggcaccttccgcttccagcagtccaccctccagcccggccagcgatactggtactactacatcatcgacggctaccacgtctcgcacaaccccagcgtggactccaccgtcgaacccaccactggccgcgccctgaacatcctcgacgtgcccaaggtcaagtcctcctcgtcttccaagtcgtcctcccgcaagtcgacctcgtcctcctcctgcaggagctcgcgcgcctcgatcagcagcgacatccccaagggccggcccctgtccatctcccagatcaaggcccccaagcccgtgtcgcccaacgccacccgccacattctggacaacgactttgacgaggaggagctcagcagccgcttcgcctccaccggtatctacgacgatgactactactatgacgatgaggacgtcatcaccgactttggcgcccccggctccccggtctcctcggtcggctcctcgctctcgtatcactccgacagctccggctcgtcgggctacagcaccccggcctcggagtgctccagctgcacctgcgagcgctacggcatcacccgaaagggcgagcgcgtccgcctcgactgcggcggctcccgctgcgcctacgacgactcgtcgtgctcctcctcggaggacgaggccgagtacatcgagcgcagctcccgccgcaacggcatcgtcgtccgcgcttaa

SEQ ID NO: 4889 - protein, 278 aa, Myceliophthora thermophilia
MSAIQLSFSLRVSSGVKTVHLLGSWDNYTGQLPLSKDKSSSKGTWKGTFRFQQSTLQPGQRYWYYYIIDGYHVSHNPSVDSTVEPTTGRALNILDVPKVKSSSSSKSSSRKSTSSSSCRSSRASISSDIPKGRPLSISQIKAPKPVSPNATRHILDNDFDEEELSSRFASTGIYDDDYYYDDEDVITDFGAPGSPVSSVGSSLSYHSDSSGSSGYSTPASECSSCTCERYGITRKGERVRLDCGGSRCAYDDSSCSSSEDEAEYIERSSRRNGIVVRA

SEQ ID NO: 4890 - DNA, 2190 bp, Myceliophthora thermophilia
atggcctctttcgacctggagaagcgcgccatcgcctcggccgaaggcaactatgtctcgcaaacctttaaagagaatactccaaggcggcggggcttccattggttggcactcctcctcggcaccctttccatcttttcaatcgctgtggcagcatcccgccgatgctccgcggcgacttcgctgttctccagctatggcgcatcgcggacctcccgttctcattccgcgcccggatcgcaaccaggctacaaccggttaccaggtaggaaggcctgggaggccaccacagcgaccacgtcgtccgcaacacctcacccaaccgtcctcaagacctttgaggttgcccagccggtcttgatgccggacggtcccgctgagagcgacggatctactcgcaacgcgacggattattcgcccgagttgtgtaccgtcctgctgatgcgccatgactttgcctggagctacgatgcgcccttcatgggggaatacactccgcccgattgcgagttcaatcgagtggtgcttaatttcagcgtcgtgagtgagggccggcaatttgaccgccttgccatcatgtactttggtgatacggaagtttggagaacatcgacagctgaacccactgcgccgcctgggatcagctggacataccttaaggatatgacccaatacctttacttctggaaatcacctcaaaagatcatctttgatctcggcaacctaattgatgacaagtacaccgggatcttcaacaccaccttgacggccattttctacaatcgtgatatcaagaccgaccaggcaccgccgagtgacctgatcatcccaatatcggctcaccgcggggccaacaactcgatcagccgcttcattttgcccacggagaacgccactaacaccatcaccctccctcgaaacatccgccgagccgtattctcagtctcggctaacggccaagcaagcgaagaattttggtggagcaatgtcctgcagacagacgttgacaccttcagcgccaccgcgggcgagcttccgggtctgagccctttccgcgaggtccaggtgctcattgacggccgtctagctggcgttcagtggccctttccagtcatattcaccggcggagtcgtcccctcgctgcatcggcccatcgtgggcatccacgctttcgatctccgcgaacacgagatcgacatcagcccgttcctcggcctgctctgcgacggtaaggagcatacctttaccatccgcgtcgccggtctcaacaacaccagccacaccgcagccacgctcaccaacacggtcaacgaaagctggtacgtgaccggcaagctcttcctctggctcgactcggacccctcttccatcacccgcggcgagatccccatcatcatgcaaccggccccggccatctccaccacccgctccgtcaccagttccctcatcaacggcacaaccgaggccaacgagacgctcacctacaccacctcggtgcgccgctccctgcgcatcacctccaacaccgcctcgtggacccagtccctcacctacaccaacaagggccacgtctccgccttcggctacacgcagttcaacaacctcctcatctcgggctccgacaccctcaggatcgcctccccgtccgtccgctaccacgccacctaccgctacccgatcctctgcaactcgacctactcggtctccccccagggcaacctctccatctcggcgtacctcagccatggcaagagcgtgtccgtgtccggcgcgagcgtcttccccacggggctggaggcgtttcagcggtatgctggcaaggggtcgacgagccgggtcgagacgaccaaggtgggcacggccgagttccggcagaccggggatgggagatcgagcaccgggtggggggaggcgaagcagtggttctggttcggtctggaggaggcggtggtggaggatggtggctctggcaccggtgcgaacccaggaactggcggcgatgtcgaaagcccggaggaccgacgcggaaaggaattagagctctactatagggaggtggaagctgtcaacgggactgtggtaggagatttgaggagattggacgggaaggcagtgagtagtggcagtggtggtgatggtgaagggcagcaaaaagttcttgtgaacgctgctgctatgcagtatgcttag

SEQ ID NO: 4891 - protein, 729 aa, Myceliophthora thermophilia
MASFDLEKRAIASAEGNYVSQTFKENTPRRRGFHWLALLLGTLSIFSIAVAASRRCSAATSLFSSYGASRTSRSHSAPGSQPGYNRLPGRKAWEATTATTSSATPHPTVLKTFEVAQPVLMPDGPAESDGSTRNATDYSPELCTVLLMRHDFAWSYDAPFMGEYTPPDCEFNRVVLNFSVVSEGRQFDRLAIMYFGDTEVWRTSTAEPTAPPGISWTYLKDMTQYLYFWKSPQKIIFDLGNLIDDKYTGIFNTTLTAIFYNRDIKTDQAPPSDLIIPISAHRGANNSISRFILPTENATNTITLPRNIRRAVFSVSANGQASEEFWWSNVLQTDVDTFSATAGELPGLSPFREVQVLIDGRLAGVQWPFPVIFTGGVVPSLHRPIVGIHAFDLREHEIDISPFLGLLCDGKEHTFTIRVAGLNNTSHTAATLTNTVNESWYVTGKLFLWLDSDPSSITRGEIPIIMQPAPAISTTRSVTSSLINGTTEANETLTYTTSVRRSLRITSNTASWTQSLTYTNKGHVSAFGYTQFNNLLISGSDTLRIASPSVRYHATYRYPILCNSTYSVSPQGNLSISAYLSHGKSVSVSGASVFPTGLEAFQRYAGKGSTSRVETTKVGTAEFRQTGDGRSSTGWGEAKQWFWFGLEEAVVEDGGSGTGANPGTGGDVESPEDRRGKELELYYREVEAVNGTVVGDLRRLDGKAVSSGSGGDGEGQQKVLVNAAAMQYA

SEQ ID NO: 4892 - DNA, 1533 bp, Myceliophthora thermophilia
atgaggggggacgagacgggcagcgcggacgacaaggtcgagacgatcaacgtggaagatgccaggctacagaggatgcagccgcctgaattcattaggaacctgactcctgaagaacgggcgcgcctggagaaggtgctcaagagaaaaattgaccttcgcctcttgccggccatcattatcatgtacatcatgaactacattgaccgcaacaacatcgccgctgctcggcttgccgggaaagtcgggcttgaggaggacctcaacctgacatctaccgagtttcagacctcagtcagcattcttttcgttggataccttctgatgcagattccttcgaacctgttcctcaacaagtttggcaaaccggccatctacctacctgcttgtatgaccatatggggactcatctccgcgcttactgccgtctgcaccaatgccgccggtctcatggcaaatcgcttcttcctcggcatcgtcgaggccgcgtacttccccggttgcctctactacctttcttgctggtacactcgcaaggagctgggcttccgcaccgccgtcttgtactcgggcgctctgatctcgggcgccttctccggtttcatcgccgcgggcgtgtcgtggggcatggacggcgcccgggggatcggggcgtggcggtggctcttcatcatcgagggtgctgctaccatcgcagtggcgatcgcttgcatgtttgtgctgcccaattttccgcggactactaagtggctcaccgaagaggagaggactttggctgcgtggcgcctccaggaagacattggagaggacgattgggtcaacagcgaggagcagaccttctggcagggtgccaagatggccttcctagaccccaagacttacatcctgacggtcctcctgttctgcatcgtcgccagcggcactgtgaccaacttcttcccgaccgtcgtcaacacgctgcaggaaggcgctttggggaacaaggagaacaagaacatctcgttgctgctgaccgcccctccctacgtgctcggcgtcatcgtcacctacctcaacgccacccacgccgacaagacgggcgagcgctactggcacatcacgatccccatgtgggtcgccgtgattgcgtacatcatcgccgcgaccacgaccagcatcgcgccgcgctatctgagcatgatgctcatggtcccctcggtctactcgggattcgtcgtcggcctcgcctggatcagcaacacgatgccgcgcccgcccgccaagcgcgccgccgcgctggccttcgtcaacgccgtcagcaactgcagcagcatctacgcctcgtacctgtatcccaagagcgccgacccgcactacacggtcgccatgattgtcaactgctgcaccgccttcatcgccatctgcacggccaccgtgatgcgtgtcgtcctcgtcagactcaacaagaagctggacgcaggtatctgggtcgagggcgccatcaatgccgttccgggtgagggggccgtcaacgggttcaggtttaaagtctag

SEQ ID NO: 4893 - protein, 510 aa, Myceliophthora thermophilia
MRGDETGSADDKVETINVEDARLQRMQPPEFIRNLTPEERARLEKVLKRKIDLRLLPAIIIMYIMNYIDRNNIAAARLAGKVGLEEDLNLTSTEFQTSVSILFVGYLLMQIPSNLFLNKFGKPAIYLPACMTIWGLISALTAVCTNAAGLMANRFFLGIVEAAYFPGCLYYLSCWYTRKELGFRTAVLYSGALISGAFSGFIAAGVSWGMDGARGIGAWRWLFIIEGAATIAVAIACMFVLPNFPRTTKWLTEEERTLAAWRLQEDIGEDDWVNSEEQTFWQGAKMAFLDPKTYILTVLLFCIVASGTVTNFFPTVVNTLQEGALGNKENKNISLLLTAPPYVLGVIVTYLNATHADKTGERYWHITIPMWVAVIAYIIAATTTSIAPRYLSMMLMVPSVYSGFVVGLAWISNTMPRPPAKRAAALAFVNAVSNCSSIYASYLYPKSADPHYTVAMIVNCCTAFIAICTATVMRVVLVRLNKKLDAGIWVEGAINAVPGEGAVNGFRFKV

SEQ ID NO: 4894 - DNA, 1401 bp, Myceliophthora thermophilia
atggcaacgccaactcccggcaccggcacctcgacgccgctcgtgctcgacccagaagagacgaccaagagcctaaacgtttctcttgccgatctctcggccaaggggaccgccctctacgtgcaaaagcagtatgaggaggctgccgaggtgtacgcgcaggccgcagagatgcaggctgagatgaacggcgagatgaaccccgaaaacgccgagatcctgttcctctacggccgcgcattgttcaaggtcggccagagcaagagcgatgtccttggtggtaaggcccccgaggccaagaaacaggccaagccgaagcctgccaaggcaaccacctcgaagaacgaaagcgctcccgcaacggcagagaagcagaacggtgccaccgaggttgccggctcgtcggccactgcgattgccgaagcagagcacaagttgaatgagacggctggagaggcggcagcgaaggcggcggtaaagcagggaaccgaaggctcaaagcccgagaagaagggtctgttccagttcgagggagacgagaacttcaccgattctgaagaagaagaggagaacgaggaaggcgcaggtgaagaagaagaagaggaggaggaggacgacttggctgtggcctttgaggttctcgacctcgcgcgcgtcctcttcaacaagcgactcgaggctgcgcaagcagaagacgaggcgcgacagggcaaaggcaaagaggtggccgaaggcagcggcgactccgccgtggtcagacacatcaaggagcgcctggccgacacgcacgatctcctcgccgaaatctcgctcgagaacgagaggtattccaacgctatcaccgattctcgcgcctccctcaagtacaaagaagaactctaccccttcgagtccgaaattgtagccgaagcccacttcaagctctccctcgcccttgagttcgcctccgtcaccaagtcctcggacgacgacgacggcaaggaatccgccggcggcggaggcgaccatgtcgaccaagcccttcgcgacgaagccgcctcggctctcgaagccgccatcaacagcaccaagctcaagctgcagaacaaggaggtcgagctcgccaccctgcacaacccggaggacaatgaggccacccgtcgccagatcgccgacgtcaaggaggtgttggccgatatggagcagcgcctgctggacctgcgcaagccacccgtggacctcaacgccgccctggggatcccctcggcccccaagaccgaggtgtcggaggaagtcaagcagaaggcgacggacctgaccgggctggtgcgtaagaagaggaaggccgagggagaggcgaagttcgaggaggaggcggcggcggccaagaaggtgcgggaggacggcgcgggctcgagttag

SEQ ID NO: 4895 - protein, 466 aa, Myceliophthora thermophilia
MATPTPGTGTSTPLVLDPEETTKSLNVSLADLSAKGTALYVQKQYEEAAEVYAQAAEMQAEMNGEMNPENAEILFLYGRALFKVGQSKSDVLGGKAPEAKKQAKPKPAKATTSKNESAPATAEKQNGATEVAGSSATAIAEAEHKLNETAGEAAAKAAVKQGTEGSKPEKKGLFQFEGDENFTDSEEEEENEEGAGEEEEEEEEDDLAVAFEVLDLARVLFNKRLEAAQAEDEARQGKGKEVAEGSGDSAVVRHIKERLADTHDLLAEISLENERYSNAITDSRASLKYKEELYPFESEIVAEAHFKLSLALEFASVTKSSDDDDGKESAGGGGDHVDQALRDEAASALEAAINSTKLKLQNKEVELATLHNPEDNEATRRQIADVKEVLADMEQRLLDLRKPPVDLNAALGIPSAPKTEVSEEVKQKATDLTGLVRKKRKAEGEAKFEEEAAAAKKVREDGAGSS

SEQ ID NO: 4896 - DNA, 2931 bp, Myceliophthora thermophilia
atggcgtcagacccaaagagcgtcgcggtcagcgacgacgtgaacgctatcgtcgaggagggcaaggagtccaagctggccccggtcccttctatccaggacaaagagaaggtcggtgccgtcgtcatcacgcccgacggcgggagcccgaccgaggaggagctgcatactctgcggcgggtgcctgacaagatcccctggaacatttacaccatcgcattcatcgagctgtgcgagcgcttctcgtactacggcactaccgccgtgtttaccaacttcatccagcagaagcggcccgagggctcgtcgaccggtgctagctacgacatcgaacatggccaggccggcgccctcggtcgcggccagcggaccgcgtttgccctgaccaccttcaactcgttctggcagtacaccatgcccctgtttggcgcctacgtcgccgacagcttcctcggccgctaccgaaccatcggcttcgcgctcctggtggacatcttgggtcacatcatcctcatcatctcgggccttccccccgtcatcaagaaccccaacggcgcccttggcgctttcatcatcggtctcgtcctgatgggcgtcggcaccggcggcttcaagcccaacgtcaaccccctcattgtcgaacagctcgacctcgagcggatggtcgtcaagacgctcaagagcggcgagcgcgtcattgtcgatcccgcgaccacggcgtcgcgcgtctaccactacttttatttcttcatcaacatcggcgccctgtgcggccagctctccatggtctactgcgagcattacgtcggcttctggctctcgtacacgctccccaccgtcctcctgtgtctctgcccgctcgtcctgctgtggggtcgccgccgctacaagcgcgttcccccgcagggctccgtcctcggccgggccttcaggctgttcttcctcgccaacaagggccgctggtccatcaacccggtcaagacgtaccggcagctgcacgacggcaccttctgggagagcgtcaagccgtccaggttcgaccccgccacgaggcccaagtggatggacttcaacgacgcatgggtggacgaggtccgccgtggcttcaatgcctgcggcgtcttcttgtggtatcctctcttctggctgtgctacaatcagatcaacaacaacttggtctcgcaagcggccactatgaaggtgggcggcgtccccaacgacgtgttgaccaatctcaaccccttcgccctcatcatcctgatcccgatcctggacgtgttcatctacccggccctgcggaggatacgcatcaacccgactccgctccggcgcatcgccgtcggctacttcgtggccgcgtcggccatgatctgggcctgcgtcatccagtactacatctacaagaagagcgagtgcggcaagtacgccaacggcaagttccccgacgggaccgagcgcgagtgcgccgacgtcgacatcagcatgtgggcgcagacgggctcgtacgtgctcatcgccttctccgagatcatggcgtccatcacgagcctcgagtacgcgcactccaaggcgcccgccaacatgcgctccatggtccaggccgtcgccctcttcatgaacgccatctcgtccgccatcggcttcgccctcgtctcgctcgccgacgaccccctgctggtgtggaactacgccgtcgtcgccatcctcgccgccatcggcggcaccatgttctggctgcagttccgccacctcgacaagcaggaggacgagctcaacatgctgcccaagggcgaggtgggcagtgccgtggccgtggccaagttcgaggaagacgagaatccccaactcttcctgatcaagagactgcgcgaaaccgactctccatccgcgccacggctgctacctcgaatcatcggcaaccctgcgtctaacagagcaccgccaacggagcgctacctgctcccggtctttgcgccctgctacgcctttgtggtcacggacgagacaacaatttctagggcatccgcactcgttccgcgccatggacagacttgtggtgaattcgacccgcgttattctcccgacttcgcccaggtcaagtgccggacctgcggcgcggtttacagcatccccttttatccgcatgcccttcccccaatccgtcgtaatcggagtccagaacagccagataagctctgcccgcaatggaacagcgacccaacttcggcgagcctgcgcgaatcgcaagctgagagagccaggtatatctgtctctcgtactgctggggacgttccaagtttctcaagaccacgcgggagagccccgaatgccacaaacgaggcatcagccttgctgagctaccacaaagtttctacgacgctgtccgaattgttcgcgcgctaggggtacggtatttctggatcgactcgctctgcatcatccagaacgacgtggacgatgccgattggaagcgtgagtcgggtcgcatggccgacgtcttccgcacttcatacctcaccgagtgcatgctatcgcccaggattctccagttcggccggcaggagaggctctgggaatgccgcggacaccggacatgcgagtgtgggcaggcatccaactcggtgtctgagatgtcaaaggacaagtttcatgaggtgactttcgatgacgatgattatgtacagtgcctctggcgcagaatggtcgtcgaacactcgaatctgcagttaacctaccctaccgacagaccacacgcactctccgggctggctgaggaggtgcggcgccacacgaagcaggagtatatggccggccaccggagaaacacgctggtgcaggatatgtgctggtaccggcccgaacggccccagcataccactgccgttaggagccgcccggcgaaagccgacctggtcttgggcatcggttaa

SEQ ID NO: 4897 - protein, 976 aa, Myceliophthora thermophilia
MASDPKSVAVSDDVNAIVEEGKESKLAPVPSIQDKEKVGAVVITPDGGSPTEEELHTLRRVPDKIPWNIYTIAFIELCERFSYYGTTAVFTNFIQQKRPEGSSTGASYDIEHGQAGALGRGQRTAFALTTFNSFWQYTMPLFGAYVADSFLGRYRTIGFALLVDILGHIILIISGLPPVIKNPNGALGAFIIGLVLMGVGTGGFKPNVNPLIVEQLDLERMVVKTLKSGERVIVDPATTASRVYHYFYFFINIGALCGQLSMVYCEHYVGFWLSYTLPTVLLCLCPLVLLWGRRRYKRVPPQGSVLGRAFRLFFLANKGRWSINPVKTYRQLHDGTFWESVKPSRFDPATRPKWMDFNDAWVDEVRRGFNACGVFLWYPLFWLCYNQINNNLVSQAATMKVGGVPNDVLTNLNPFALIILIPILDVFIYPALRRIRINPTPLRRIAVGYFVAASAMIWACVIQYYIYKKSECGKYANGKFPDGTERECADVDISMWAQTGSYVLIAFSEIMASITSLEYAHSKAPANMRSMVQAVALFMNAISSAIGFALVSLADDPLLVWNYAVVAILAAIGGTMFWLQFRHLDKQEDELNMLPKGEVGSAVAVAKFEEDENPQLFLIKRLRETDSPSAPRLLPRIIGNPASNRAPPTERYLLPVFAPCYAFVVTDETTISRASALVPRHGQTCGEFDPRYSPDFAQVKCRTCGAVYSIPFYPHALPPIRRNRSPEQPDKLCPQWNSDPTSASLRESQAERARYICLSYCWGRSKFLKTTRESPECHKRGISLAELPQSFYDAVRIVRALGVRYFWIDSLCIIQNDVDDADWKRESGRMADVFRTSYLTECMLSPRILQFGRQERLWECRGHRTCECGQASNSVSEMSKDKFHEVTFDDDDYVQCLWRRMVVEHSNLQLTYPTDRPHALSGLAEEVRRHTKQEYMAGHRRNTLVQDMCWYRPERPQHTTAVRSRPAKADLVLGIG

SEQ ID NO: 4898 - DNA, 1509 bp, Myceliophthora thermophilia
atgtcggagctcaagcatccatcggacgaggaggacaccaaatatccggcggccggcaaagtcgctgtcggtggcgatgcggcccgtcattacgactcggccccgggctcggaggaggtcgtctgcccgccccacaccacggatcgccggatcacgaccaagattgacgcatacatcatccccttcgtctcggtgctctacctcatggccttcctcgaccgcgtcaacatcggcaacgcccgcgccttcggcctcgaggaggagctccacatgggcggcgtcgagtacaacacggcgctaaccatcttcttcgtcccctacatcgtcttcgagatcccgtccaacatcctgctcaaacacttcaccccccgcgtctggctgtccatctgctgcatcggctttggctccgtcaccgtcttccagggcctggtccaaaactacagcggccttctcgccacccgcttcttcctgggcgctttcgaatgcgtcctgttccccgggtgcttctacctgatcggcagttggtaccgccgtgccgaggcccagaagcgcttctccctcttcttctcgtccacctcgctggccggcgcctttggcggcctcttggcctcggcgatcgggaagatggaccacatccggaactaccggggatggcgctggatcttcctcctcgagggctgcttcaccgtcctcttgggcgtcatcttcctcttcaccttcccttccttcccggaacaggcgacctggcttcgtgacgacgagcgcgagtacgtcaaggcccggctgcgcgcctcgcagggcgcgagtggtgccgagcgcaagatcaagctcagagacgtcaaagacgtcatgtccgactacaagatctggctcggcggcttcatgtacttcggcctcatcgtaccagcctactcgtacgcctacttcgcgcccaccatcatccagagctacaagtacgatcctatcaccacccagctgcgatccgtccctccctgggccgtctcgtttggcttctccatgatcgtcgccatcttgtcagactgggccaagcatcgcttctcgttcatcatcgggtccatttgcatcgccatctcgggcttcgccgtcctgctctccgtccacgataacctgcaggttcagtatgcggccctgttcttgacctgcatgggtacctactcggccatgcccgtcattgtgtgctggttcaacatgaacctaggcgggcatcaccggagagccatcgggagcgcctggcagattggcttcggtaatatcggcggtatcatcgcgacctattcgttcgtcaaaggcgacgcgcccttttacaggaagggctatgccatctgcctctcgttcatctgcctcagcgtgctatcttgttttgcgtatgccgcggccatcacgtgggagaacaagaagcggagcaagcaggtgcacgacctgaacttgacggaagctcagaagctggatcttggggatctgaacccggagttcaggtacatgctatga

SEQ ID NO: 4899 - protein, 502 aa, Myceliophthora thermophilia
MSELKHPSDEEDTKYPAAGKVAVGGDAARHYDSAPGSEEVVCPPHTTDRRITTKIDAYIIPFVSVLYLMAFLDRVNIGNARAFGLEEELHMGGVEYNTALTIFFVPYIVFEIPSNILLKHFTPRVWLSICCIGFGSVTVFQGLVQNYSGLLATRFFLGAFECVLFPGCFYLIGSWYRRAEAQKRFSLFFSSTSLAGAFGGLLASAIGKMDHIRNYRGWRWIFLLEGCFTVLLGVIFLFTFPSFPEQATWLRDDEREYVKARLRASQGASGAERKIKLRDVKDVMSDYKIWLGGFMYFGLIVPAYSYAYFAPTIIQSYKYDPITTQLRSVPPWAVSFGFSMIVAILSDWAKHRFSFIIGSICIAISGFAVLLSVHDNLQVQYAALFLTCMGTYSAMPVIVCWFNMNLGGHHRRAIGSAWQIGFGNIGGIIATYSFVKGDAPFYRKGYAICLSFICLSVLSCFAYAAAITWENKKRSKQVHDLNLTEAQKLDLGDLNPEFRYML

SEQ ID NO: 4900 - DNA, 1239 bp, Myceliophthora thermophilia
atgagcgtacctagcacacagcgcccctcggcgacttgcgtccaggtcacaccggacatttcgattcaacccccgctctctcgccggggaaacggtccgggcctggtgttggttgtttccaagaacctcgacttgagctcgcatgagaagacacttgatcctccgccgctccagaaatgggccgaggagggctactctgttgctcaggtccgtattggcgacgggtccagcatcaccagccaagtcggtattgccgttgcggagttgcaaaagctaccggaatgctcgggggaaaagttcggtctcgttggctgggggcaagtgatacctgacgagaacacggccagccacatcttgctccttgacgccatcagaagcctgacagcgatcgtcggcgctgtcttttacggagattgcccagatgttgaaccccccgtcccggtgcttgcacacttaccgggcaacacgaacaggccatcgggcgagcctatgaggcctgagggcctcaccattcactcgtacccaggagctgggcggtttttcatcatcccagctcacgcagactatcgcgcgagtgctgcggccgtggctcatacgcgctcgctgtcgttcctcaaaccgcttatgggaggtccttattttgacctcgaggccatctgggacgagcacacacgctatgagttcgccgaccgcagcgtcgaggagaccatggccacaatggtcgatcagccatacgtcaaccacgtgcccaccttgaccgggggaatcggacaggcgaagctgacgacgttctaccgtgaccacttcatcttcagcaaccccaacgacgccaacttggagctggtcagccggacggtggggatcgaccggatcgttgacgagtttctgttcaactgcacccatgatcgggtcattgactggctaatcccgggcgttcccccgacgttcaaacggctgagcattccgttcaccagcgttgtcaacatccgcggcgaccgcctctatcacgagcacatcgcctgggatcaaggtacagtcctgcggcagctgggcctgcttcccgaatacctgccgtttccatatgcactcccggatggtagggcgccgggcaatggtaagcggttcgagtaccgagtgcctgttgcgggcggggaaacagcagagaaactagtcgatgagaacgcagtgccgtcgaatgaaatgattctgtttggtgtcagggaagttcctgacaaatag

SEQ ID NO: 4901 - protein, 412 aa, Myceliophthora thermophilia
MSVPSTQRPSATCVQVTPDISIQPPLSRRGNGPGLVLVVSKNLDLSSHEKTLDPPPLQKWAEEGYSVAQVRIGDGSSITSQVGIAVAELQKLPECSGEKFGLVGWGQVIPDENTASHILLLDAIRSLTAIVGAVFYGDCPDVEPPVPVLAHLPGNTNRPSGEPMRPEGLTIHSYPGAGRFFIIPAHADYRASAAAVAHTRSLSFLKPLMGGPYFDLEAIWDEHTRYEFADRSVEETMATMVDQPYVNHVPTLTGGIGQAKLTTFYRDHFIFSNPNDANLELVSRTVGIDRIVDEFLFNCTHDRVIDWLIPGVPPTFKRLSIPFTSVVNIRGDRLYHEHIAWDQGTVLRQLGLLPEYLPFPYALPDGRAPGNGKRFEYRVPVAGGETAEKLVDENAVPSNEMILFGVREVPDK

SEQ ID NO: 4902 - DNA, 918 bp, Myceliophthora thermophilia
atgcagatcttcgtcaagactttgactggcaagaccatcacccttgaggtggagtctgcggattcgatcgagaccgtcaagaacaagatccaggataaggagggcatcccccccgaccagcagcgcctgattttcgcgggcaagcagcttgaggatggccgcaccctttcggattacaacatccagaaggagtccactctccaccttgtcctccgcctccgtggcggtatgcaaattttcgtcaagaccctgaccggcaagactatcaccctcgaggtggagtcagcggacacgatcgagaccgtcaagaacaaaattcaggacaaggagggcatccctcccgaccagcagcgcctgatttttgcgggcaagcagcttgaggatggccgtaccctttcggattacaacatccagaaggaatctactcttcacctcgtcctccgtctccgtggcggtatgcagattttcgtcaagacccttacggggaagacgattactctggaggttgagtcagcggacacgatcgagaccgtgaagaacaagattcaggacaaggagggcatcccgcctgaccaacaacgcctcatctttgctggcaagcagttggaagatggcaggacgctgtctgactacaacattcagaaggagtccactctccaccttgtcctccgtctgcgtggcggtatgcagatctttgtgaagacacttacggggaagacgataactctggaggtcgagtctgcggatacgatcgaaaccgtgaagaacaagattcaggacaaggagggcatcccgcctgaccagcaacgtctcatctttgctggcaagcagttggaagatggcaggacgctgtccgactacaatatccagaaggaaagcaccctccacttggtgctgcgtctgcgcggtggtcagtaa

SEQ ID NO: 4903 - protein, 305 aa, Myceliophthora thermophilia
MQIFVKTLTGKTITLEVESADSIETVKNKIQDKEGIPPDQQRLIFAGKQLEDGRTLSDYNIQKESTLHLVLRLRGGMQIFVKTLTGKTITLEVESADTIETVKNKIQDKEGIPPDQQRLIFAGKQLEDGRTLSDYNIQKESTLHLVLRLRGGMQIFVKTLTGKTITLEVESADTIETVKNKIQDKEGIPPDQQRLIFAGKQLEDGRTLSDYNIQKESTLHLVLRLRGGMQIFVKTLTGKTITLEVESADTIETVKNKIQDKEGIPPDQQRLIFAGKQLEDGRTLSDYNIQKESTLHLVLRLRGGQ

SEQ ID NO: 4904 - DNA, 1224 bp, Myceliophthora thermophilia
atgtcgccctcggccgctacaaccctgtcactcgattcccttccgcgaccgtccccttctaccggactcacgaccgtgtcccctagtctctcgactgcttcacaaacgccggcgcagggaatccggtccgggcctgggtttccgactcggcgccgcctaaggacacgggatgggcatgagaggaaacggtccagattaagcatggacgaggaaagtccgctcgaatcggtcgattactggctcaacttcgacaaggaggacggcttgcccagcgtatctgagacggccgggcctcggaggccagatcttgacagcaaaaataagattcccacgacggacggggcttctgaatcaatagccgcaccttccgccaatgatgtcgacgagttcctggacgacagtgcccttgacaatgcgctatcggacgacgacggcttctcctccatcaaccttaccgatcaactttccagagtcgacactgcgccacctcaggacgtgccgccacgagagggtctgtattcgacgcccttgagttgggagagaccacagccggggatacgtatggacccgctggttggactcaataccacctcgttgaatgaagccgagcaaaggcgattaattgccattgccatgaacccgggatcgaggatgggaggccttgggtcaaacatcaacttcaattttaccgggatgagtactactatgcccatgtcgtttggtgctacactgggaggcacaagcacacctcagggtccgaagcccgtctctccgcctcagccgcccgcagtgcaaccgcgcgccgggcagtctacggcgccaaagaagcaagcgagtaccggtgaaaagagcaaggagaagccgaagacgggcgagcgggcggcgcataacgatattgagcgaaagtaccggacaaatttgaaggacaaaatcgcggagctacgaaatgcggtcccatcacttcgaacagtctcggaagaaggcggcgatgacgatgagacacagcagtctagggcggctaaagtcagcaagggcaccgtcctcgcaaaagcgatcgagtacatccaccaacttgaacgacggaataaggagattgtagaagagcatcgggagctctctcgtcgccttcaagcttttgagcaattattaagtgccgcggctcagcaagcatacaccatgccagcctacagcagaacactattcgatccaagaggcttctgctag

SEQ ID NO: 4905 - protein, 407 aa, Myceliophthora thermophilia
MSPSAATTLSLDSLPRPSPSTGLTTVSPSLSTASQTPAQGIRSGPGFPTRRRLRTRDGHERKRSRLSMDEESPLESVDYWLNFDKEDGLPSVSETAGPRRPDLDSKNKIPTTDGASESIAAPSANDVDEFLDDSALDNALSDDDGFSSINLTDQLSRVDTAPPQDVPPREGLYSTPLSWERPQPGIRMDPLVGLNTTSLNEAEQRRLIAIAMNPGSRMGGLGSNINFNFTGMSTTMPMSFGATLGGTSTPQGPKPVSPPQPPAVQPRAGQSTAPKKQASTGEKSKEKPKTGERAAHNDIERKYRTNLKDKIAELRNAVPSLRTVSEEGGDDDETQQSRAAKVSKGTVLAKAIEYIHQLERRNKEIVEEHRELSRRLQAFEQLLSAAAQQAYTMPAYSRTLFDPRGFC

SEQ ID NO: 4906 - DNA, 954 bp, Myceliophthora thermophilia
atgggcatgtttgacccgaacttggctggttacttgggcgtcttctttctcggagctgacccgtacgtctacttttatctcagcaatggaaacaaccctgtctccttcagggccttgaatggaggctcgccaatcataaagccaacgaaaggcaccgggggagtccgagacccgaccattattccaggaggtggaagcgaagccggcaagaagtggtacatcatcgggacagatctagacattggcaagacaacgtgggatgcggcgcagcgaaccggatcaagagggatctttgtgtgggaaagcaccgacttgattaactggggtaacgaaagactcgtcgaggtggaagatgccaccgccggcatggtttgggctccagaggcaatctgggatcccgcgaaaggccaatacctggttcactgggcatccaaattctactcgacctccgacccgagccacaccggctctccttccaacattcgcatccgctacgcctacaccagcgacttcaaaaccttcacctccccgcaaaccctcatcgacaaaaaccccactaatatcatcgacttgactattctcccaatcaatggcacggactcgaactccttccttcggttcatgaaagacgagacacgtaaaacagtctttgtcgaggtctccgacaccgggctcttcggcacgtggactaggccaggcggcgattcggcaatcatccagcagggcgtagagggtccggcggcgtactgggacaacacaactccggggaaagcacaccttctgctggatttttacggggaggacggatacaggccgtttgagagcaccaatccgggcagcaacagcggatggacaaggagcgataggtcggcatttccaacgaatttgaggcatgggagtgtgttgccggtggatcaagcggcttatgagacgttaaacgcgcggtggggttag

SEQ ID NO: 4907 - protein, 317 aa, Myceliophthora thermophilia
MGMFDPNLAGYLGVFFLGADPYVYFYLSNGNNPVSFRALNGGSPIIKPTKGTGGVRDPTIIPGGGSEAGKKWYIIGTDLDIGKTTWDAAQRTGSRGIFVWESTDLINWGNERLVEVEDATAGMVWAPEAIWDPAKGQYLVHWASKFYSTSDPSHTGSPSNIRIRYAYTSDFKTFTSPQTLIDKNPTNIIDLTILPINGTDSNSFLRFMKDETRKTVFVEVSDTGLFGTWTRPGGDSAIIQQGVEGPAAYWDNTTPGKAHLLLDFYGEDGYRPFESTNPGSNSGWTRSDRSAFPTNLRHGSVLPVDQAAYETLNARWG

SEQ ID NO: 4908 - DNA, 1521 bp, Myceliophthora thermophilia
atgcctgcgtcgccatcggtaagggtaaaggtaaccctcctcgctgatgcctcattctccattcctttgactgggacccccgatgcactgacacaacgagcagagagaaaaccgattgatccgccacccatcgtgcagctcttggtcaaccctaggaaggacccggccaggaccttcctccaaaacccgtacctgatccttaccgccaggctcatccgcaagggtgacgaggacaatcaagacgatcaatcggcacccaaggaaagcgacctcacaggtacccttgtttcgtcgctctacagcctgaaagacaccgacaatagccaagggggtttcttcgtgtttggtgacttgtccgtgagaagggtgggcacctaccgcctcgcgttcattctctacgagttgcgactggccgagaaggagtgttggctgctgtctcgcaccgtctcggacccatttgtcgtctacgcgaccaagacgttccccgggcttgccgagtccacctttctcacgcgctcgtttagcgaccaaggggtgcgcctccggctccgaaaggactcgcgcaccgtctcgacaaaaaaacgcaccatcagccaggcggagcagatccgcgcctcccaggggatgcacggctacctgccacatgacgcggaccatgaccttagccccaacggccactctccgcatcatctccgccgcgtaaactccctccacgaccaggctcagctggaccgctctcgcagctactactccgaatctccccagatgcgcgccggcgagtacacctccagcccatacggctacaacccctacgacgaccagaagccgcttaaacgcgcccgcatggatggcaccccagacagcccacacttctcaggtggcagtggcggcggttatgagaccgacgcatatcatacctacagccaccaccacccccatccccattcgggtccgcgtaccgtccccgatcctctcggctccatctaccctctcacatcaacaataaccagcagcagcagcagcagcagctacaccaccatcccctcccaacccgccgtccttcctcccgtgccctcgccctacggctccatgccgcgcctcgacacgacgcatctcccgccgcactcgcccgcggccgcggggccgggctcggcaacgtccaccttctcgcatggaactgccggaagcggcggcggcacaaggaggagccccacaatcagcggcagcagcggcgctggttatccgtacccgacacacccaggacacggcgggcagcaagccatgtttgccgccgccgccgccgccgccgccgccgcagtgtcgcaagggacgagtttgccttaccatccggcggtgacggcgcacgggggggagcatcacgttgctgctgctgctgctgctgctgccgccgccgccgccgccgccaatgctcaccatcatccacatcccggtgctgcggcagggttgggaatcgtcggggttggggcggggctaggggggttggacttggacagaccttga

SEQ ID NO: 4909 - protein, 506 aa, Myceliophthora thermophilia
MPASPSVRVKVTLLADASFSIPLTGTPDALTQRAERKPIDPPPIVQLLVNPRKDPARTFLQNPYLILTARLIRKGDEDNQDDQSAPKESDLTGTLVSSLYSLKDTDNSQGGFFVFGDLSVRRVGTYRLAFILYELRLAEKECWLLSRTVSDPFVVYATKTFPGLAESTFLTRSFSDQGVRLRLRKDSRTVSTKKRTISQAEQIRASQGMHGYLPHDADHDLSPNGHSPHHLRRVNSLHDQAQLDRSRSYYSESPQMRAGEYTSSPYGYNPYDDQKPLKRARMDGTPDSPHFSGGSGGGYETDAYHTYSHHHPHPHSGPRTVPDPLGSIYPLTSTITSSSSSSSYTTIPSQPAVLPPVPSPYGSMPRLDTTHLPPHSPAAAGPGSATSTFSHGTAGSGGGTRRSPTISGSSGAGYPYPTHPGHGGQQAMFAAAAAAAAAAVSQGTSLPYHPAVTAHGGEHHVAAAAAAAAAAAAAANAHHHPHPGAAAGLGIVGVGAGLGGLDLDRP

SEQ ID NO: 4910 - DNA, 963 bp, Myceliophthora thermophilia
atgtccaacacggtcaaggaagcggctgaagcagcacggccccagggaaacgaaatgatgggaacggccaagaacgtcaagggcgacggcgacgccgtcgccaatgacttcttacacacgcccttcatgcgggccgccttacccttcatcaatggcggcatcagcggcatggtcgccacgacggtgatccagcccgtcgacatgatcaaggtccgcatccagctggcgggcgagggcaaggctggggggcccaagccgactcccctctccgtcacccgcgagattctcgccagcggcaaggcccttgacctgtacacgggcctttcggccggcctgctccggcaagccgtatacacaaccgctcgcctcggcttcttcgacaccttcatgggccagctcacctcgcgcgccaaagccaagggccagagcataggcttcgcggagcgcgccggcgcaggccttgcagctggcggcctggcagccatggtcgggaatccggccgacctcgccctgatccgtatgcagagcgacggcctcaagccggtagccgagcgcaaaaactacaagtcggttattgacgcgctggtatccatcgccaagagcgaaggaatcggggcactctgggcgggagctgcgccgacggtcgtgcgtgccatggcactcaactttgggcagctcgccttcttcagcgaggcaaaggcgcggctcaaggagcacaccagctggtccggcaacgcggtcacgctgagcgcgagcgccatcgccggcttcttcgccagcttcttctcgctgccctttgattttgtcaagacgcgcctgcagaagcagtcccgcggccccgacgggaagctgccgtacaacggcatggccgactgtttcgccaaggtggccaagcaggagggcccgttgcgcttttatcgcgggttcggaacgtactacgtgcgcattgcgccccatgcgtga

SEQ ID NO: 4911 - protein, 320 aa, Myceliophthora thermophilia
MSNTVKEAAEAARPQGNEMMGTAKNVKGDGDAVANDFLHTPFMRAALPFINGGISGMVATTVIQPVDMIKVRIQLAGEGKAGGPKPTPLSVTREILASGKALDLYTGLSAGLLRQAVYTTARLGFFDTFMGQLTSRAKAKGQSIGFAERAGAGLAAGGLAAMVGNPADLALIRMQSDGLKPVAERKNYKSVIDALVSIAKSEGIGALWAGAAPTVVRAMALNFGQLAFFSEAKARLKEHTSWSGNAVTLSASAIAGFFASFFSLPFDFVKTRLQKQSRGPDGKLPYNGMADCFAKVAKQEGPLRFYRGFGTYYVRIAPHA

SEQ ID NO: 4912 - DNA, 1545 bp, Myceliophthora thermophilia
atgcccaagcgtaaacgcgacgacgtccctctggacgccctcgtcccccgactccgcaccgacatcttccacgcgctcaaacaggccaagggcttcgagcgccagaggcaatccaagcgcctcgccgacccgaagacgcccgctgagaagaaggctcgcatcgagaacgagattgtggtcctcaaatccctcgacttgcatcacacggcccacgcgcacctctgcacgtcgctgctcaagatcaaggccatcgccgagcactcggacaggctgccggaggagatccgggcgggtgtgcccaagccggacgtgaccgaggaggagagggtcgcgctgcacaacgtgaccagctccctgtacaaccgggtcgaggtgaagcgggcggtcgagaaggccattgaggccgtctgtagaggcatcggggtgcccgtaccggagaagaaggggaaggggaagaaggggagggaagagaaaacggaagacaagaccgacgggactaggactgatggtgcggtaaagaagaaggagaaaaagaaggctgaacaagccggggagagggaagggcgcgaagaacgggacaagcagtcgggaaagacggaaaaggaaaagggtcagaagaaggctgatggagttgatcaggacggcgacaatgacgtggacgaggaggaggaagagaaggcggtctctcagctggacaagatgctaggcttggattctggcgaggagagcggtgacgaagaggaagatgatgtgctggtgaaaggccggacgagaaaaccgtctggcaaagagctcgatccgatggagatcacaaccgacgaggacggcagcgacgaggaggatttggatcctatggaggtcacctctgacgaggaagggggcagcggcagcggcagcggagacgagtttgacggcttcagcgatgatgcggagggcccgcagagctcggccagcgacgacgagggcgtctcggaggccgagagctctacttcgtcagaatcccgctcccccccgccaaagaaggcgaagaaggcgaagggtgctctcaaaccgacagattctacatttctccctacgctcatgggcggctatatatccggctccgaatcagcatccgatatcgacgtggccccgaaacgcaagaaccgccggggccagcgggcgagacaggccatttgggagaagaagtatggcgacaaggcaaggcacttgcaaaaggcggccaagggtcgcgacgcaggttgggatcccaagcggggtgccgtcaatggggaatcgaagccgtggaaacgaggtatccgcaatcctctcctggataaggacaaggccaaggcatcggggacaaacgagacaaagcagaccaacgagaagaagcaagcggacaatgagaagaagcagccaaccgacgagaagaagaagaagccggctccgaggaagcgggacgacacggggcctcttcacccgagctgggaggcaaaacgaaaggccaaggagaaacaacagcttagtgctccgtttcaggggaagaagatcgtctttgattga

SEQ ID NO: 4913 - protein, 514 aa, Myceliophthora thermophilia
MPKRKRDDVPLDALVPRLRTDIFHALKQAKGFERQRQSKRLADPKTPAEKKARIENEIVVLKSLDLHHTAHAHLCTSLLKIKAIAEHSDRLPEEIRAGVPKPDVTEEERVALHNVTSSLYNRVEVKRAVEKAIEAVCRGIGVPVPEKKGKGKKGREEKTEDKTDGTRTDGAVKKKEKKKAEQAGEREGREERDKQSGKTEKEKGQKKADGVDQDGDNDVDEEEEEKAVSQLDKMLGLDSGEESGDEEEDDVLVKGRTRKPSGKELDPMEITTDEDGSDEEDLDPMEVTSDEEGGSGSGSGDEFDGFSDDAEGPQSSASDDEGVSEAESSTSSESRSPPPKKAKKAKGALKPTDSTFLPTLMGGYISGSESASDIDVAPKRKNRRGQRARQAIWEKKYGDKARHLQKAAKGRDAGWDPKRGAVNGESKPWKRGIRNPLLDKDKAKASGTNETKQTNEKKQADNEKKQPTDEKKKKPAPRKRDDTGPLHPSWEAKRKAKEKQQLSAPFQGKKIVFD

SEQ ID NO: 4914 - DNA, 1617 bp, Myceliophthora thermophilia
atggcttcgacgggcaacagcgaccgcgatgccgtcgatcagtcccatgtcggcgccgctgctgcgggcgacgaccaaaaggttgatccctacaaggacgtcgtcgaggccgagcgggcgccgtcgcccgagctcgagaagcggctgaggcccgactactcgaagatggacaaggagctggcccagtacgtctcggacacgcgcatcgacatctcggaggaggagaacaaccgactccgccgcctcgtcgacaagcgcgtcctcgtcatcatgatcaccacctacttcctgcaggccatcgacaagggcaccatgagctttgcctccatcatgggcatcatcgaggacaccggcctccacggtcaacaatatcaatggctcaccacgtgtatctacatcaccatcctgatcgtcgagtacccgcaaaactggctcatcgcgcgcgtgccgatcgccaagtacctctccttctccatcatggcctggggcgcggtgctggcctgcacggccgcctgcacctccttcgccggcctggtgacggtacggacgctgctgggcctgttcgagtcggtctgccagcccgccttcgtcgtgctgtcggcgacgtggtaccggcgcgaggagcaggcggcgcgcgtgacgtactggtacatgatgaacggcgcccagcagatcgtcggcggcctgctggcctactgcttctccctcatccgcaccggcccgctcaagtcgtggcagtggctcttcatgtcctacggcatcatctcagtcatctacggcgcctttgtcggatggtggatgcccgactcgcccatgcgcgcgaagtgcttcaccgaggaggacaagcgcctcatggtcgagcgcgtccgcgccaaccagaccggcgtccagaaccgccagtggaagaagcaccagttctgggagggcatcctcgacccccaggcctggggctacgccctcatccagctgtgcaccaccctcccgaccagcggcctcggcagcttccagggcctcatcatcaagtcctttggcttctccgtcctgcagacccagctgctcgccatggtcctcggcgcctacatcatcatcgtcctgctcagctcctcctggctcgtcaagaagaccaaccagaacctgctggtcatgctgggctttgtcattccgtccttcatcggcaccatctgcctcatgacggtcccaatcgagaccctgggccagaaggtcggcctggtcatctgctactacatcacgctgtccttctggtccgcccagacgctggccctgtccatgctgtcgcgcaacgtggccggacagaccaagaagagcgtggccgtggcgctcaactttatcatctggtccaccggcaacgccatcggcccccaagtcttcctcgactgggacaagccccggtacttcatcgccttcgctacccacctgggctgctacactctgctggtcatcgtcatcctcggcctccgcttctacctcaagtaccagaacaagaagcgcgacgagctggccgcgtccggcgctgccgaggccaaggacgagaacctcgtgcacgcgttcgaggacctgacggacaaggagaaccccaacttccgctacgtgtactag

SEQ ID NO: 4915 - protein, 538 aa, Myceliophthora thermophilia
MASTGNSDRDAVDQSHVGAAAAGDDQKVDPYKDVVEAERAPSPELEKRLRPDYSKMDKELAQYVSDTRIDISEEENNRLRRLVDKRVLVIMITTYFLQAIDKGTMSFASIMGIIEDTGLHGQQYQWLTTCIYITILIVEYPQNWLIARVPIAKYLSFSIMAWGAVLACTAACTSFAGLVTVRTLLGLFESVCQPAFVVLSATWYRREEQAARVTYWYMMNGAQQIVGGLLAYCFSLIRTGPLKSWQWLFMSYGIISVIYGAFVGWWMPDSPMRAKCFTEEDKRLMVERVRANQTGVQNRQWKKHQFWEGILDPQAWGYALIQLCTTLPTSGLGSFQGLIIKSFGFSVLQTQLLAMVLGAYIIIVLLSSSWLVKKTNQNLLVMLGFVIPSFIGTICLMTVPIETLGQKVGLVICYYITLSFWSAQTLALSMLSRNVAGQTKKSVAVALNFIIWSTGNAIGPQVFLDWDKPRYFIAFATHLGCYTLLVIVILGLRFYLKYQNKKRDELAASGAAEAKDENLVHAFEDLTDKENPNFRYVY

SEQ ID NO: 4916 - DNA, 357 bp, Myceliophthora thermophilia
atggctgacagtgaggagaacgtcaacttgatagacgagacgcccatctcgcccagtcggtctagccccgcccggaaaaactctcttgagtttcatttaagccaccggccaggccgtcaagaactagtcgacagaaacattctccctgcttcaacagccgctccgggccttcaggcgaaccaaaaacaacttgagaggcacatgcgggccgattcgttgaacgaaaagattgcacatcggccttccccggaagcgctgatccgagacggcgtattgcatgaagacccgcgcgctcccgacgataaatacgccgaggcgattgaggaggaatacgcaaagcgagagggcggtgcctga

SEQ ID NO: 4917 - protein, 118 aa, Myceliophthora thermophilia
MADSEENVNLIDETPISPSRSSPARKNSLEFHLSHRPGRQELVDRNILPASTAAPGLQANQKQLERHMRADSLNEKIAHRPSPEALIRDGVLHEDPRAPDDKYAEAIEEEYAKREGGA

SEQ ID NO: 4918 - DNA, 2991 bp, Myceliophthora thermophilia
atgcgacgagctcgatcttcccccacggcctcgccgtaccgcgcgctggcgcaccatcaagcccagtatggctcgtcccaggggcagcaggcgcgtgactccgtgtcatcggtcctgcgatccttcgatgtcgagacaaatccggcgcggccaatgcggccttcgccgctgacggcttcaaccatcccggacatgcccctcgacctggtcgaccgcatcaggtcattcccgctcttcatgtccgcgcccgacgacttcctcgctgccatcggagctcatctacgcccacagacccataacgcgcacgaccatatccttaccgagggagatgacgccaaggcgatgtactggctggttcgcggtgttgttgccgtcacttcgcgtgatggcgaggctgtctacgccgagctcaaacccggagctttctttggcgagatcggcgtgctcatggacatgccgagaacggcgaccatcattgcgaggaccaagtgcctcctggtcgtgctgaagaaagaggatttgcgggccgaactccccaagtttcccgaaatggaacaagcgatccgccaggaagcgcaggagcggctggccattctcaagaagaagcggcaagaggggggcaaagacgccaagcttccagagaccagcgccgcgggcgtcgcgcgcgaggccgtgccgggggaggtcagtatgggggatagtgggataatcagggagggagcagtggtgaacaacaagaagcgcaagtctcccagccccggagtcgtcgaggacccgaccatcagcggcagcgccctcggcagtgcctacgtaaacgtgcgcaagacgctcaaggagcttcccttgtttgccacgctaccggcagacattctgcatttccttggcctaaacgcccagcccaggacttacccaccctttaccgacattgtccgccagggcactcccggcaacgacatctacttcatcgtccgcggcgaggcggaagtgatacaggaccctgcgagtcccaccctcagacgaacgtccaaggcgacgtattcgcgcccaaggttaaagcaaggccaatattttggagaggtggcgagtcttggtctgtcgcagtggaggaccgcgacagtacgcgccgtgtcagatgtcgagtgcctcatgattcccggtgatgtgctggacgagttgtggaggcggtgtccgccagaagtgaagtgtcaggtcgaagagaccgcgaggcagcgtttccacccggaggacgtcgagatggaggatgcggaaacaaaagagagaccaacgcgggaggagaaggcgggcccggccgtcaccttcgatctcccttccaaaccagtgtcaccgcccaacgaggaggaggatacgcgccggccgtcggatcccgaccccttcctgagcgtcgacatggagaatttccgcaataggaggcgcaactcgctcgcgccgccgaccccacagacggactgcagcgttatcgtgggcgggatcaaggtaccaccggtcgcacccgctccgccgctcctgtcgcccatatctcttgacgactcgccctttcccaagcgcgcgcgtacccttcccatcggtaccaaggccaaggagaaggcgacgttcccggatagcgtttggattggcgtcttcgagcacctcgaccttctcgagatgctccgcctgagggccgtctgcaggaagtggcgccagatgctgacgacgagtcccgagctctgcacgcgcgtcgatcttggccggatcaaccgcaaggtgaccgactggtcagtggccaacatcctggcgcccttcatcggcacccgcgcggtcgagatggacatcagcaactgcttccacattaccgacgaagggttccaggcgctgtggaaggcgtgcggcaagaacgtcaaggtctggcggatgcggagcgtctgggacgtgtccgcctcgcagatcctcgagatgagcgagtgcgccaaggacctcgaagagatcgactggagcaactgccgcaaggtcggcgacaacctgctggctcgcgtggtcggctgggtcgtccccaacccggcccccgcccgcgagagcaacaagaacgttgtcattgcaccctccaacgccaagccgcgccgcggccaacgcaacccccagccgggccccccttcccagccgtccgcaccagcccccggtacggtcgtcggctgcccgcggctccgccggctgaatctctcctactgcaagtacgttacggaccgctccatggcacacctcgccgcccacgcctcgtcgcgcctgcagtccctgagcctgacgcggtgcacctcggtgacggacgccggcttccaggcctgggccccgcaccgcttcacgcagctgacgcacctctgcctcgccgactgcacctacctctcggaccacagcatcgtcgccctcgtcggcgccgccaagggcctgacccatctcgacctcagcttctgctgcgccctgtccgacaccgcaaccgaggtcgtcgccctcggcctgcccatgctgcgggagctgcgcatggccttttgcgggagcgccgtcagcgacgccagcctcggctgcatcgcgctgcacctcaacgagctgcgcggcctcagcgtgaggggctgcgtccgcgtgaccgggaacggggtcgagaacgtgctagaagggtgctcgcggctcgagtggttcgacgtgagccagtgcaagaacctcggggggtggctggccggcggcggcgtcgagaggtgggggttcgacgagaggttcgtcggccagccgggacacgggtcggtggtccccgggagcgtgcgggtcaaaggcggcggcccccctggtggggtgggaggagaaacgcgcaggacgatgactgatgcgaagccgctcgggccgggccccatattgcggccggtgataccgcctaagggcgcccctccgtccaggtcgaggaagccggttaggtttgtggtcgagaaaggacccggcgaactgaggtaa

SEQ ID NO: 4919 - protein, 996 aa, Myceliophthora thermophilia
MRRARSSPTASPYRALAHHQAQYGSSQGQQARDSVSSVLRSFDVETNPARPMRPSPLTASTIPDMPLDLVDRIRSFPLFMSAPDDFLAAIGAHLRPQTHNAHDHILTEGDDAKAMYWLVRGVVAVTSRDGEAVYAELKPGAFFGEIGVLMDMPRTATIIARTKCLLVVLKKEDLRAELPKFPEMEQAIRQEAQERLAILKKKRQEGGKDAKLPETSAAGVAREAVPGEVSMGDSGIIREGAVVNNKKRKSPSPGVVEDPTISGSALGSAYVNVRKTLKELPLFATLPADILHFLGLNAQPRTYPPFTDIVRQGTPGNDIYFIVRGEAEVIQDPASPTLRRTSKATYSRPRLKQGQYFGEVASLGLSQWRTATVRAVSDVECLMIPGDVLDELWRRCPPEVKCQVEETARQRFHPEDVEMEDAETKERPTREEKAGPAVTFDLPSKPVSPPNEEEDTRRPSDPDPFLSVDMENFRNRRRNSLAPPTPQTDCSVIVGGIKVPPVAPAPPLLSPISLDDSPFPKRARTLPIGTKAKEKATFPDSVWIGVFEHLDLLEMLRLRAVCRKWRQMLTTSPELCTRVDLGRINRKVTDWSVANILAPFIGTRAVEMDISNCFHITDEGFQALWKACGKNVKVWRMRSVWDVSASQILEMSECAKDLEEIDWSNCRKVGDNLLARVVGWVVPNPAPARESNKNVVIAPSNAKPRRGQRNPQPGPPSQPSAPAPGTVVGCPRLRRLNLSYCKYVTDRSMAHLAAHASSRLQSLSLTRCTSVTDAGFQAWAPHRFTQLTHLCLADCTYLSDHSIVALVGAAKGLTHLDLSFCCALSDTATEVVALGLPMLRELRMAFCGSAVSDASLGCIALHLNELRGLSVRGCVRVTGNGVENVLEGCSRLEWFDVSQCKNLGGWLAGGGVERWGFDERFVGQPGHGSVVPGSVRVKGGGPPGGVGGETRRTMTDAKPLGPGPILRPVIPPKGAPPSRSRKPVRFVVEKGPGELR

SEQ ID NO: 4920 - DNA, 2262 bp, Myceliophthora thermophilia
atgacggagaagaagtccttcgaggccaccgcggccaccggcgcggtgcgcccgttcgccgagagccagccgcccgtcgaagatgccaccgagctcaagacgcacgacgtctcggtcgagaaggcccccaccgaggttgaggaggtcgatgaggaggacctgtaccgcccgctggccatggacccctcaattccgcacgaggagaacccgctcaccttccgggccgtcttcaccggctgtgtcttgggctcgcttgtttgcgcctccaacctctacctcggtctgaagacgggtttcacattcagcgccaacatgttcggcgccatcttcggttacggtgttctgaagctgctcgaaaagacgggcggcaagctccccatcatcggcggcatgtttggtccccaggagaactcgatcgttcaggccgccgccaccggagccggcggcactggcggcatcttcgtcgctgcgattcccgccatgtaccagcttggtgtcatggacccgggtcattcccccaaggatgacatcggcatcattttcaccatcaccctcgtcacctccttcattggcctcttttacgtcacgccgctacgccgcttcttcattatccaggtcgcgcgggagctgaagctcatgttcccgaccgcgacggccgttgccctgacgatccgatccatgcacgccggtgccgcgggcagcattgacgctctcaagaagctcaagtgcctcgctgtctgcttctttggtgcccttatccaccgcgtctgttcctactacgcggtcggcatcctttacgactggcacgtcttcacctggattcacatctggagcggctacaagagctgggccatgaatatcgagtcctggggctggtatatggagtggacgcccgccttcatcggctccggcatcctgatcggcctcaaccccgccatctccatgttcatcggctctctcaccgcctgggccatcatcgggcccgctctggtccactacggcgagtgcatcggtatcgacctgagcgacggcgatcccaagtggaacggctactacactttcgccagccttagcaacctcggcaagcagacgccctccccgcgttactggctcctctggcccggcgtcatggtcatggtgtgctgctccatggccgagctgctcgttcagtacaaggccatctgggcaggcgccaagtcgatctggaaccagacctgtgcgggcatcaacagcacgctggttgcgcgcggcaagtcgagcgctttcttcgagaagcacggctccgtccaggccaagaatgaggacattgttgaggatcccttcccgcccaaggagcaggtcaagacgtggatgtgggccctgggcctgctcgtcgccctcgtcatcggcatgatcatcttccacttccagtgggacacccacccgggcctgaccatccttgccatcgtgctcgccttcctcttctccttcctcgccatccagattggtgctgtgacggacaatacgccgctcacggccgcctccaaggcgtcgcagctcatctttggcggcgccacctccaacagcggctacacgatccagcacgcccaaaagatcaacctcgttgctggcgctctggcctcgggcggtgccgacatggccacctcgctggtcagcgacttccgtaccggcttcctgatcggcacctcccccatcaagcagtggatcgcccaggccattggcgccttctgctccgtctggctcgggccgggcctctttgtgctcttcacgtcggcctacccctgcatctggtcccctaaccaggaggaccgcgccaagtgccccttcctcgtcccctccgtgtcggcctgggccgccgtcgcgcaggccgtcaccgaccccaacgtcgccatcccactcaagagcggcatctttgccatcgtcatgggcgtcgtctccatcatccaggtcgtgatccgccacttctacctggtcggcgaccgcgccaagtaccgcgcctggctgcccaactggggtgccatcgctctgtcctgggtcgtccctgcccccgtgtttgccaacgctgcactgctcggtgccatcattgccgccctctggaggaagtacagcatgaggacctgggatatctacggctatgccgtggctgctggtttcattgccggcgagggtcttggcggtgtcgtcggtgccatcctcacgcttgccaatgttgatggcagcgtcaagggcaccaatgtggcctgcccgatgaattcgtgctag

SEQ ID NO: 4921 - protein, 753 aa, Myceliophthora thermophilia
MTEKKSFEATAATGAVRPFAESQPPVEDATELKTHDVSVEKAPTEVEEVDEEDLYRPLAMDPSIPHEENPLTFRAVFTGCVLGSLVCASNLYLGLKTGFTFSANMFGAIFGYGVLKLLEKTGGKLPIIGGMFGPQENSIVQAAATGAGGTGGIFVAAIPAMYQLGVMDPGHSPKDDIGIIFTITLVTSFIGLFYVTPLRRFFIIQVARELKLMFPTATAVALTIRSMHAGAAGSIDALKKLKCLAVCFFGALIHRVCSYYAVGILYDWHVFTWIHIWSGYKSWAMNIESWGWYMEWTPAFIGSGILIGLNPAISMFIGSLTAWAIIGPALVHYGECIGIDLSDGDPKWNGYYTFASLSNLGKQTPSPRYWLLWPGVMVMVCCSMAELLVQYKAIWAGAKSIWNQTCAGINSTLVARGKSSAFFEKHGSVQAKNEDIVEDPFPPKEQVKTWMWALGLLVALVIGMIIFHFQWDTHPGLTILAIVLAFLFSFLAIQIGAVTDNTPLTAASKASQLIFGGATSNSGYTIQHAQKINLVAGALASGGADMATSLVSDFRTGFLIGTSPIKQWIAQAIGAFCSVWLGPGLFVLFTSAYPCIWSPNQEDRAKCPFLVPSVSAWAAVAQAVTDPNVAIPLKSGIFAIVMGVVSIIQVVIRHFYLVGDRAKYRAWLPNWGAIALSWVVPAPVFANAALLGAIIAALWRKYSMRTWDIYGYAVAAGFIAGEGLGGVVGAILTLANVDGSVKGTNVACPMNSC

SEQ ID NO: 4922 - DNA, 5478 bp, Myceliophthora thermophilia
atggcaagctcaccaccagcgtcgcccggcggaccacctccgcgacccatgagcgccatgatccgtccgacaccgaggagcaacagccgcatgagcatgcagagcagagccgggggaggaagcagggcgtcggacgaggatgcgaagacggccgtcaaagtcgcggtccgagttcgccctcccttgcagccgaccgaccccggctacgaacttataccccagcgtttccagcggtctatggtacatgtgcagtcgccgacaagccttgctatcgactcgccccaggggcgcaagcttttcgttttcgacagggtattcgcgcccgaggtggatcaggcagggatatgggaatatctcgaggagtgcatcaacgcgtttacccagggttacaatgtctccctgctcgcctacggccagtccggcgccggcaagtcgtacacgatgggcacctcgggccctgccgagcaagatgatcccgaggcaatgggcgtcatcccgcgcgctgcaaccgcgctgttcgagcagctggagggacccaagaggaatcccaaccggagttccatgtcgcagcttcgtacacccgcgcgatactcggcgtcgcaagcggccggcccctctcatggggagaagaactggacgctgcgcgcctcgtatgtcgaaatctacaacgagcagctgagggacctcttgtcgccagacaacgttccaccccacgagcgagccaccgtcaccatccgcgaggacgtcaggggcaacatcatcctcaccggcctgcgccaggtcgaggtcaactcggtcgaggagctgatgagcgtcttgaaccagggctctaccctccggcaaaccgatgcgacagccatcaacgcgcggtcgtcccgctcccacgccgtcttcaccctgaacctcgtgcagaagaagaacaggctgcaaacggcccaaggcgccgagaggcggctctcgatgccgttggaagccttgaccggaggcgagacgctcgtgacgacggacagcaagatgcactttgtcgacctggccgggagcgagcgcctcaagaacacgggcgcccagggcgagcgcgccagggaaggcatctcgatcaacgggggactcgccgcactcggcaaggtcatctcgcagctgtcgtctcgtcagcccggcgctcacgtatcgtaccgcgattccaagctcacccgcctgctccaggactcgctaggcggcaacgccatcacgtacatgatcgcctgcgtgacgccggccgagttccacctcagcgagacgctgaacacggtgcaatatgcgcagagggcccgggcgatccagagcaagccccggatccagcaggtcgaggagggcgacaagcaggccatcatcgaccgcctgaaggccgaggtggcattcctgcgggagcaaatccggagtgcggaaaggagcgggggcgagcgccgtgccctgacccccggcgagaggtccgagcggcagagcgagcgggaggtcgagctccagaaccgcctgttagacgccgaggagaactacaagaccctgagccagcgccacgcgaaactcatcgcggagatggccaaggccagggacaaggaggccgccgagaatcagcacaaccacgaggagggcgacagtgccaccgagcgactcaaccgctctaacagctttgcccaggcggtggagcaggttgtgctcgagtacgagaagacgattcagtcgctggagcactcgctcaccagtacccgggccaccctggccatcaccgaaggcaaccttctcgagagggagaccaagtgcgcctacaccgagaccatcaacaaccagctccaagcgaggctgcagaagatgatggaccgcgaggcgagcaccgaacactacctgcacgacctggaggccaagctggacgggcatacgtcgggcgaggagaagaacgccatgatcatcgaggagctgcgcaaggagatcagccgcctgcgcgagaacgaggccacgtgcgaggactacatctcgacgctcgaagagcgcctcgccgaggcggatcaggatgccgagctcatgcagcgcgagatcgacaggttagagcaggttatcgagcgccagcgcagcctaggaaagctggactcgctcttgcacgagctcgacaatatccagcaagacgcgccagccgccgacgccgcgaacggactgagcaacggcaacggcaacggcaccggcaccggcaccggccatcggcgcacggccagccgcagcattgcccagcgctcgcgcagccagagctacgtcagccgacacagccagatagaggaggaggcgattcccgagaggggggaggaagacatcccggaggaggtcgaggatggggccgagacgcagaagaacgcgactgcggagacgaccgcggaggccaccacgccgaaaccttcgcacgctcgcccggcagccgagactcgcgaggccgagtacgccgccagccccgcgcagtccaagttcgttgccgacaagctcgagaccgtcacccaggagcttctcggcttgcgtgtcgagcacgagacgacgcttaacgagtacgggctcctccaggccaagtacgaggaagcgctccgtgccctcgccgagctccaggatgtggtggacgagtcgcggcacccgcaacgcccgagggactcgatgctctcggtggcctcgcccttcacccggccgcactccttctcttccgatggtaggactaacgacaccaccaaggacggcgcgcatctctcctctaagtcgctctcgtccgaactgtcctcggcattggattctccagctaccaccgtggaagcgtccgacgcggagactgcggtggtgcccaaggccgaggatgccgccggatctgggccggccgagccgaccagggcggatgcccttgctttggaggttgagagactcaaggcgcttgccgccgagagagagcttgccgagaaggagcttgccgagcgctatgcccagctggaagaacagcaccagcacaccctcgacatggtcgaggaactcaagacggaggtcgccaaggcccaggcggccagcagcgaagcgtcgtcgccaaagggcaacaccccggtgatccgccgcaagtccagccagaacgtcatgatcatcgatcgcgctcaccggtcgttcgcgtcgctgcggaacattgccgccgagaactttgagaaccagccggatgtgatgcaaaacttcgagctcaacctgaatgcggccatgcacgagctccactcgagatccgagcgcatccaggagctcgaggccgacgtcgcgacagccaagaaggagatggagacgaagatgaccatcatctcgggcctgacgcgcgagcgctccagcttgaaggcgacctcccccatggatatggccatggtatccaccctccgggagcagctcgagcagagcgagatgcgcatcagggagatgcaggaggcgcattccgcgcgcgagaaggaactggagggtcagctggccgagctgcgggagtcgctgaagcaggccacgctcgaggcagaggaggccagggcatcggccaaggcggccgtcgagctccaagagtctatgaagcaggcttctctcgccgcagcggagaactccacagccgatgccgaggccgttgccgagttgcaggaatcgctcaagcaggcgactgcggcggcggcggaggcggcagagtctgccagggcagcctcggaggagtcggcagcccagctcgagctgcgcgagaagaggatctcggagctcgagtccgagctcgccggctgggaggagaggcacaacacggccttgcagagcatgcgcgagacggaagagcagatggccaagacgatcaaggaactcgagagccaggtcgcggccgtctcggagcagctggccgaggccgagcggaagagacccgaggaagaggaggcgcttaaggaggccgaggccaagcacaaggagctggtcgacttcttgcggagcgagatcgatgagtacaagagcatcatcagcagcaaccagtccaaggttgccgaggtcgagcagcagcacacggcgaccaagaagctgctcgagattgccgcgaacgaccgtgacgaggcgtcgaaggaactcgaggcgcacaaggagctggtggctaagctggaagctcaaatagccgatcacgaagagaccatcagagcccaccaggagagcatcagcgagctgcagtcgaagcacgctcgggagatcgaggagctggagtcgtctgcgaagcaagatctcgagtcgcagctagcggccctcaagtccgagcacgcaggtcgcatcagccggctcgagggcgatctgaccgaggcgcgggaagagctcatgaaggttgccacgcaggtcgccttcgctctcggtctggacgtcagcgtcgagaggatctcggagcgcatcgaacagctcgcctcgtaccagaaggctctggtccaggagcaggagaggagggaagaactcgagagccacgtgctggagctgtccaacatcaacgacgcggtcatgcgcgacctcgaaacggtccgggagagcttgaacgaggttctcgagggggagagcgccgatgcgaagaatccttcttgcccggtcaaggagcaggtcgacctggtcaagaagaaggtggcggacctcgagaccaagaacaagaagaactcgcggctcgtcgaagagctcgaggaccagctgcagaacaactacgatcaggtacagatggcgagcaatcgcctgtcgacgctgcagatggagcgaaacgcgcagctggaggaggccaacgccgccaaggccaagctgcaatccgagctggataccctccgggaggagtacgccgctctccaggccaagctggacgctgtgcagtcggccgagagtccgcagcgctccaactcgcttacgggccaggtccgcaagagcaactcggtcgcctccctcccgtccccgccgccggccatcccgctgccccctctcccgaacggcacgtcgggctccaacccgggcacgacctcgccgacccctcggccgcccagcaaggacatcggcgggggctcgccgtcgtcgccatcgtcgtcggcggcggcgacggcgggcatgatgcagatccaggaggaccaggaggcgcggatccggctcatcgagaaggcgctccgggcggagaagcagctgacggcgacgctggaggaggcgctcacggatctggagcagcagcagaacgcgctgcagtccgactgcgaggcgtggcggcgccgggccggcgagctcgaggccgaggtcaaggcgctcaaggagcggccccccgcggcggccgaccaggacctccaccggtacagcctgcagcaggtcgaggaggagcggcgcaagcggcgcgacgccgagatcgcgcgcgcgcacctcgaggagcgcatgaacaccatctccaagaagaagaagaaggggagcctcaactgcttctaa

SEQ ID NO: 4923 - protein, 1825 aa, Myceliophthora thermophilia
MASSPPASPGGPPPRPMSAMIRPTPRSNSRMSMQSRAGGGSRASDEDAKTAVKVAVRVRPPLQPTDPGYELIPQRFQRSMVHVQSPTSLAIDSPQGRKLFVFDRVFAPEVDQAGIWEYLEECINAFTQGYNVSLLAYGQSGAGKSYTMGTSGPAEQDDPEAMGVIPRAATALFEQLEGPKRNPNRSSMSQLRTPARYSASQAAGPSHGEKNWTLRASYVEIYNEQLRDLLSPDNVPPHERATVTIREDVRGNIILTGLRQVEVNSVEELMSVLNQGSTLRQTDATAINARSSRSHAVFTLNLVQKKNRLQTAQGAERRLSMPLEALTGGETLVTTDSKMHFVDLAGSERLKNTGAQGERAREGISINGGLAALGKVISQLSSRQPGAHVSYRDSKLTRLLQDSLGGNAITYMIACVTPAEFHLSETLNTVQYAQRARAIQSKPRIQQVEEGDKQAIIDRLKAEVAFLREQIRSAERSGGERRALTPGERSERQSEREVELQNRLLDAEENYKTLSQRHAKLIAEMAKARDKEAAENQHNHEEGDSATERLNRSNSFAQAVEQVVLEYEKTIQSLEHSLTSTRATLAITEGNLLERETKCAYTETINNQLQARLQKMMDREASTEHYLHDLEAKLDGHTSGEEKNAMIIEELRKEISRLRENEATCEDYISTLEERLAEADQDAELMQREIDRLEQVIERQRSLGKLDSLLHELDNIQQDAPAADAANGLSNGNGNGTGTGTGHRRTASRSIAQRSRSQSYVSRHSQIEEEAIPERGEEDIPEEVEDGAETQKNATAETTAEATTPKPSHARPAAETREAEYAASPAQSKFVADKLETVTQELLGLRVEHETTLNEYGLLQAKYEEALRALAELQDVVDESRHPQRPRDSMLSVASPFTRPHSFSSDGRTNDTTKDGAHLSSKSLSSELSSALDSPATTVEASDAETAVVPKAEDAAGSGPAEPTRADALALEVERLKALAAERELAEKELAERYAQLEEQHQHTLDMVEELKTEVAKAQAASSEASSPKGNTPVIRRKSSQNVMIIDRAHRSFASLRNIAAENFENQPDVMQNFELNLNAAMHELHSRSERIQELEADVATAKKEMETKMTIISGLTRERSSLKATSPMDMAMVSTLREQLEQSEMRIREMQEAHSAREKELEGQLAELRESLKQATLEAEEARASAKAAVELQESMKQASLAAAENSTADAEAVAELQESLKQATAAAAEAAESARAASEESAAQLELREKRISELESELAGWEERHNTALQSMRETEEQMAKTIKELESQVAAVSEQLAEAERKRPEEEEALKEAEAKHKELVDFLRSEIDEYKSIISSNQSKVAEVEQQHTATKKLLEIAANDRDEASKELEAHKELVAKLEAQIADHEETIRAHQESISELQSKHAREIEELESSAKQDLESQLAALKSEHAGRISRLEGDLTEAREELMKVATQVAFALGLDVSVERISERIEQLASYQKALVQEQERREELESHVLELSNINDAVMRDLETVRESLNEVLEGESADAKNPSCPVKEQVDLVKKKVADLETKNKKNSRLVEELEDQLQNNYDQVQMASNRLSTLQMERNAQLEEANAAKAKLQSELDTLREEYAALQAKLDAVQSAESPQRSNSLTGQVRKSNSVASLPSPPPAIPLPPLPNGTSGSNPGTTSPTPRPPSKDIGGGSPSSPSSSAAATAGMMQIQEDQEARIRLIEKALRAEKQLTATLEEALTDLEQQQNALQSDCEAWRRRAGELEAEVKALKERPPAAADQDLHRYSLQQVEEERRKRRDAEIARAHLEERMNTISKKKKKGSLNCF

SEQ ID NO: 4924 - DNA, 3222 bp, Myceliophthora thermophilia
atggaggcgaccacagctgcttcctcgtcttctgcggcagcgccccttgagcgctctatatcctatcaatcggccacttcgatcaggagtcaccggtctaccgctcgcgcccgcaagaggctgacatcacagcccccgagctcggcgtcgtccatcgccgcgtccgacaagtctctgacctcgtttccttccttttccccggactccccacgcgaagagagaagctacttcttccgcgaggacgacgacacgacgccggtaacctcatcacgcaagacatcgggacagagcctggccgtcccggaacagggtgacaccaaggagccggagcagagcaagggcggcgacggacaagggcagcagggaaacggtcaccaggaacgggcccggccgtctgcgattgtggatcacctcaccgccaccgcagtcgtatcccccgcgcgcggcgccctgttcgacgatgcgccgccgccatcacgcaacatccccggagcgctgcacctcgccgatgacgagcatatcgagcgcctgatcgcccgccacggcgccgtcaacctcgtgcgccagatagccgaggaccttgcccggcgagatgcccagatctcgactctgcgtcggcgggccgacgagcgggagcgggcgctgcgcaagatcattctggagtgtggcctgtccagcctggatctcgagacgcgcctgcgagccgtggagcagcaggcaaaggccaacggggcttcgagacgggcatcgggagaaggcatctcggacctcgtgacggatgccatggccgaagacatgaggcatcatcccttttcaagccacgtcttcgatgacgcaaccatccgttcaagctcggttcccttaccggttaacacggatgctgagcttcccaagggttcggcgcgcgggtggaaggactacctttggggcagcagtacggtaaagaagtccggccgggcagatagcctgctgcgagaggcaagcaagcagccacccgctgttgtcaaggccacgccggcagagcgacggccggccctgcaggaagaccttttcactccgccccaagaggacctgcccgtgcggagtcccagccgagcgtccagcatcggctcgagcaatgcctcccgaaaaccgtccctggcgagcatggcgttgcggctggtggcgggcggagggtcaacggcgcgtgacggcgaggctcgcggacgcacgagcagtgcccagtcaggggccgcgacgaggacaccgtcgagctcgagcctcaacgccggcggctcggtccgtgccgcgtcgtctcagagcagcggcccgaaggccttgatggcaatgcgccgaccagccggccccgtccgccccatcgatgtcccgccgccgcgagccttcacccaagaccgctgggataccatggcccctacgcctggaggtgaccagcttgcgtcgcaccaccagaactacggtccggtcgagatggacacgatcctcccggcggaggcccagccgccgacattgacacagttctacaacaaccacgtgggcgccgacctgctcaccgaccgcttcggcttcatctacgatcagcgccggaagaagcgccaacgggaggcggctcaaatggcccgccatgcgaagaagaatagccgcgccgagatggtccacggccgaaacggcctgtctccggtggtgctggaggacaacgccagcggaaatgtgagcgtcagtagcgacggccggcccgacacgcccggctcgtccgaagagccccgcgaggaagcgaagcccaagagatggcaggattacctcaagatcgcgaccttcccgaccgaactcctctctcacacgccctcgatcagcgccctgggtgtcgaggtgttggaggcttccgagacgcccaaatcccccggccagtcgccgagcatcgtgtcggaggacaggggcttcttgccgtccgccaccaccaccacggccgcaataacgccaagcgacagcgagatccagcccgtttccgagtccgatcagcaacagcaccggcagcagcagccacaacagcagtcttctcccgcgacgctcgcgaaagaagacgccgagcccgtccggctgctcctggagaacctcaacaacttgcacgataccctccagcgcgagaagacggtcaggtggaacgactttctccgcaaggtcagggcggagcgcaaacgcgacggcgaggcggcggcggcggccgccgaggcgcggttccagcgcgccaccgccgtcatgcccgagacgcgcatcggggacggcgagctgatcggcgtcgccagcctcggcatccagggcaagatcggccgggccaaagccagcgagttccgctccctggtgctcggcggcatccccgtcgcctaccggtccaagatctggtccgagtgctgcggcgccaacgcgctccgcatccccggccactacgcctccctggtcgcccgcccggaaaccagcgacgacccgcaggtggtcgcccagatcaaggccgacatcacgcgcaccctgacggacaacatcttcttccgcaaggggcccggcgtccagaagctccacgaggtcctgctcgcctactcgcgccgcaacccggacgtgggctactgccagggcatgaacctggtggtggccaacctcctcctgatcacgccgtcggccgaggacgccttctggatcctgtgctccatggtggagacgatcctgccgccgcactacctggaccactcgctgctggcgtcgcgcgcggaccagacggtgctgcgccagtacgtgcgcgaggtgctgccgcgcctgtcggcgcacttcgacgccctcgccatcgacctcgagaccatgacgttccagtggttcctctccctcttcaccgactgcctctccgccgaggccctcttccgcgtctgggacgtcgtcctctgccacccggccgacgccggcgccttcctcttccaggtcgccctcgccctcctcaagctcaacgaggccgccctcctccgctgcgagagccccgccgccgtctacacctacatcaaccaccagatgaccaaccacgccatcagcatcgacggcctcgtccaggccagcgaggccctccgccgcctggtcaggagggacgagctccaggcccgcagagcccgcgcggtggagggggagaggcgcgcggcacaggggaagaagaggcgcggatggcggcgccggtgccggcgggagtag

SEQ ID NO: 4925 - protein, 1073 aa, Myceliophthora thermophilia
MEATTAASSSSAAAPLERSISYQSATSIRSHRSTARARKRLTSQPPSSASSIAASDKSLTSFPSFSPDSPREERSYFFREDDDTTPVTSSRKTSGQSLAVPEQGDTKEPEQSKGGDGQGQQGNGHQERARPSAIVDHLTATAVVSPARGALFDDAPPPSRNIPGALHLADDEHIERLIARHGAVNLVRQIAEDLARRDAQISTLRRRADERERALRKIILECGLSSLDLETRLRAVEQQAKANGASRRASGEGISDLVTDAMAEDMRHHPFSSHVFDDATIRSSSVPLPVNTDAELPKGSARGWKDYLWGSSTVKKSGRADSLLREASKQPPAVVKATPAERRPALQEDLFTPPQEDLPVRSPSRASSIGSSNASRKPSLASMALRLVAGGGSTARDGEARGRTSSAQSGAATRTPSSSSLNAGGSVRAASSQSSGPKALMAMRRPAGPVRPIDVPPPRAFTQDRWDTMAPTPGGDQLASHHQNYGPVEMDTILPAEAQPPTLTQFYNNHVGADLLTDRFGFIYDQRRKKRQREAAQMARHAKKNSRAEMVHGRNGLSPVVLEDNASGNVSVSSDGRPDTPGSSEEPREEAKPKRWQDYLKIATFPTELLSHTPSISALGVEVLEASETPKSPGQSPSIVSEDRGFLPSATTTTAAITPSDSEIQPVSESDQQQHRQQQPQQQSSPATLAKEDAEPVRLLLENLNNLHDTLQREKTVRWNDFLRKVRAERKRDGEAAAAAAEARFQRATAVMPETRIGDGELIGVASLGIQGKIGRAKASEFRSLVLGGIPVAYRSKIWSECCGANALRIPGHYASLVARPETSDDPQVVAQIKADITRTLTDNIFFRKGPGVQKLHEVLLAYSRRNPDVGYCQGMNLVVANLLLITPSAEDAFWILCSMVETILPPHYLDHSLLASRADQTVLRQYVREVLPRLSAHFDALAIDLETMTFQWFLSLFTDCLSAEALFRVWDVVLCHPADAGAFLFQVALALLKLNEAALLRCESPAAVYTYINHQMTNHAISIDGLVQASEALRRLVRRDELQARRARAVEGERRAAQGKKRRGWRRRCRRE

SEQ ID NO: 4926 - DNA, 1902 bp, Myceliophthora thermophilia
atggcggagaaagcgccttcgtcgggtgcggactcgatcacccctcagtctcccaacatggccgacttggagaagcagcggagcacccctccgggtgacaagcacgcgccgtatctcgacccgtcggtcatggaggaagactatgaaggcaagccgaccgaggaggagctggcaaccctgcgccgtgtgcccggcaaaatccccattatcgcctacctcatctgtgtcgtcgagttctgcgagcgagcctcgtattacggcgtccagcctctaatcagcaactacgtcaaccggccgcttcccgagggcggtaacggctggggcgcaccccctcgtgggagccaggctaccggtggtgctctcggcatgggcaccgtcgtcgccaatgctgtaacgcagtccttcagcatgcttgcctatgcacttcctctcgtgttcggctggctcgctgacgcgaagacgggccgcttcccgctcatttgctggggcgtcgctgtattcggcgttgcccacgttctcatggtcgccgccggcgcaaaggacctgctggcgaatgggaacgcgaaggctccatacttcctctcggtttatattctgtctgtgggcgctgctgcggtagccatgttcaagccgaacgtctcgcctcttctgcttgatcaggtcacaaccaccgttcccaaggttatcacgctcaagtctggcgagagagtcattgaagaccccgagtcgaccacggagcgggttatgctctggttctacctcatgatcaacattggtggtttcatgggtgtcgctacggcgtactcggaaaaatatgtcggctggtggctcgctttcctcattccgctcatcctttaccttcccctgccgctgctactctggttcctccacaagcgccttgtcctccatcctcccggtggcagtgatctacccaacgtcttcagagttcttggtatctgcttccgccgcggaggtatcaagagaatcggtcgccacggcttctgggatcttgccaagccgtctaacattgccgctgccggcctcagcggcaagttcaagacccagtggaacgacgagttcgttgacgatgttcgccggactttccaagcgacgggcatcttctgcttcttcccgatccagtatctgaatgacaacggcattggcgccgcggccagcttcttgtcgaccatgctcgagaccaacggcgtgcctaacgacgtcatctccaacttcaattctctgagcattattgcctgtgcgcccattctcaactacggcctgtacccgcttttgcgcaggttcaatattcactatggacccatatcgcgcatgaccaccggcctggccatgtccaccctcggtggcgtgggttacactctgctgaaccactttgcgtaccagaagtctccctgcggggaatacggctcgagtgactgcaggattggcactggtgtcgctcccatcagcatttggtggatggccattccttttgccattggcggcatctcggagctgtttgtcaacgtcccagcctacggtatcgcttactcgcgtgcacccgtcaacatgcgaggccttgtttcagctcttaaccttttcaacacggctgtcgcttatgctattggcctggcttgctcgagtgtcattacggacccgtatcttacttgggactttggaggtactgctattgccggtggaattctgaccgttctcttttacttcaccttccgccacatcgacgatgaagagtatgtcttgagcaagaaccagcccgacaccgattaccacctggaaatggagggcacccgtaacgtcgttggcgagaactcgctcaacaagagcatcaacagaccggcgccaatcgcggagaacgaggaaatgatgatctcgcagaagcagtga

SEQ ID NO: 4927 - protein, 633 aa, Myceliophthora thermophilia
MAEKAPSSGADSITPQSPNMADLEKQRSTPPGDKHAPYLDPSVMEEDYEGKPTEEELATLRRVPGKIPIIAYLICVVEFCERASYYGVQPLISNYVNRPLPEGGNGWGAPPRGSQATGGALGMGTVVANAVTQSFSMLAYALPLVFGWLADAKTGRFPLICWGVAVFGVAHVLMVAAGAKDLLANGNAKAPYFLSVYILSVGAAAVAMFKPNVSPLLLDQVTTTVPKVITLKSGERVIEDPESTTERVMLWFYLMINIGGFMGVATAYSEKYVGWWLAFLIPLILYLPLPLLLWFLHKRLVLHPPGGSDLPNVFRVLGICFRRGGIKRIGRHGFWDLAKPSNIAAAGLSGKFKTQWNDEFVDDVRRTFQATGIFCFFPIQYLNDNGIGAAASFLSTMLETNGVPNDVISNFNSLSIIACAPILNYGLYPLLRRFNIHYGPISRMTTGLAMSTLGGVGYTLLNHFAYQKSPCGEYGSSDCRIGTGVAPISIWWMAIPFAIGGISELFVNVPAYGIAYSRAPVNMRGLVSALNLFNTAVAYAIGLACSSVITDPYLTWDFGGTAIAGGILTVLFYFTFRHIDDEEYVLSKNQPDTDYHLEMEGTRNVVGENSLNKSINRPAPIAENEEMMISQKQ

SEQ ID NO: 4928 - DNA, 1206 bp, Myceliophthora thermophilia
atgccgccgttccgcgccgaacatatgggctccctcctacggcctcaaaagctactagaggttcgtgcagctatccgtgaaaagggtttaaacccagatgaggccggcctacctgctatcgaagaggaggctgtagcaaatatagtgaagctacagcaggagttaggctttaaggcggtgactagtggcgagtaccctcgtacccgtttttggggtcttatgtggcacgagtttgagggtaccgtccgacttgaagacgccaacgaagaactatttagactttaccatcccgatgtctgttcgcttgtttcagtctcgcgcaaggttatgccaggagagtcggtcatcactgggtcgaagctgagacataatcccgagaagtcgtggtccaacctccacgagcttcgtcttgtgcaaaagtttgtgccgcagagcgagtgggcaaacatcaagctcaccatgatcacgccagcctggtttcacatgcgttacaagcaaggccgggcttataccaaggaagcatacgcgaacgacgccgagtacttcaaggacgtggccaaggtctaccaggccgagctggatcagctctacaaggcagggctacgcaacgttcagtttgacgaccctggtctggcatacttttgttccgacaagttccggcaagggtgggctgaggacccggacaacattgggaccgtcgacgacctcctggacgcttacatcgagctatacaatgactgtctcagcaagctgccggccgacttccacacgggggtgcacctctgtcgcggaaacttcataggagggaagtttttcgctgagggaggctacgacgtgatcgcgcagaagctcttccagaagctcaaagtcaacaccttctacctagagtacgacaccgagcgcgccggcggtttcgagccgctcaagttcctccccaaggacaagaatgttgtgatcggggccatctctactaaggtccgggagctagaagacaaggaagaagtaaagagacgcatctaccaagcggcggatttcgtcgcagagggcagtaaccagacccgcgaggaggctctcaagcgtatttccgtcagcccgcagtgcgggttcagcacccacgagagtggctacccgcttaccgaggaggacgagaagaagaagctagcgctaatccggcagatcgctgacgagatctggggcgagccgtaa

SEQ ID NO: 4929 - protein, 401 aa, Myceliophthora thermophilia
MPPFRAEHMGSLLRPQKLLEVRAAIREKGLNPDEAGLPAIEEEAVANIVKLQQELGFKAVTSGEYPRTRFWGLMWHEFEGTVRLEDANEELFRLYHPDVCSLVSVSRKVMPGESVITGSKLRHNPEKSWSNLHELRLVQKFVPQSEWANIKLTMITPAWFHMRYKQGRAYTKEAYANDAEYFKDVAKVYQAELDQLYKAGLRNVQFDDPGLAYFCSDKFRQGWAEDPDNIGTVDDLLDAYIELYNDCLSKLPADFHTGVHLCRGNFIGGKFFAEGGYDVIAQKLFQKLKVNTFYLEYDTERAGGFEPLKFLPKDKNVVIGAISTKVRELEDKEEVKRRIYQAADFVAEGSNQTREEALKRISVSPQCGFSTHESGYPLTEEDEKKKLALIRQIADEIWGEP

SEQ ID NO: 4930 - DNA, 2634 bp, Myceliophthora thermophilia
atgttgcaaggactggtcgggagcacaggagaagcgggtgttggtgttgcatttatatttgacggcgagtttgctcaacttgctgctctggcgtcacctagtcgggattctttgtttggtcattcgttttacttcttttattctgtgtttattcccccctggtactctgctttctcatcggataagatgccctgggtacggtggaacattgtcccggctactgttaagggaaagtcagcgcaacattggcgcgggaggaacaccgtcggaatgctctccggatctcaactccccccatcaagcggcgatcgcccccgctgccgaggatgcgaccacccgcgaccggcgtacacgggcggctacacgaccgtccggtcccgcctgagcaccatgctcgccaacgcagagcacgccgggtgtgacgtgtgcgcgatcctgtcagagggcatcctcaagttcctcgggagcgagtggagcccgctcaggagagaggatgcggacgagctgctcgtcgatttcaacctggctggctcgaggcggagcgtcgaggttacctttttccagacgtcggtcaagttgtcgttttttgcctctgagatcaccccctggctagccgagaacatgccggacctgcctctaggaaacgacgtcccctcggccacttggtcggatgagagcaccgcctgggccgtccagcagctggagcactgcaagcggacgcacgagtcctgcaacagcttccctccggcgccgttgcccagccgggtgctcgacgtgttggcgcatggcggcgagggcgtgcgtctgtatgtgtcccagggcgagacggctccctacgcggccctgagccactgctggggccgcaagccgtttctgcgcaccatgtcgggcagcctcgaggagcacaggaacgagatcgcgtgggcgcggctgccccggaccttccgggacgccgtcgagtttgtgcgcaagctggggatccgctacctctggatcgacagcctgtgcatcgtccaggacgacctcgacgactggcgccgcgaggcctcccgcatggcctcggtctaccagaacgccgccttcgtcgtctcggcggccaaggcggcgggggcctacggcggcctgtacgccgagcttccgcccacccaccggcccctcacagtccggttcaagtcagggggcccgcaggagcgggaacgacaacgggaacaggaggagcagcaggagcagcaaagggaggaggaggtggtcgtccacgtccgccgcgtcctctcgcacccccaccgcgtcccctcgccgtacaacgcgcccatcccgcccctccccatcttcacccgcgcctggatcatgcaggagcgcttcctgtgcccgcggatcctgcactttgggcccgaggagctctcgtttgagtgcctcgagtccaccgcgtgccagtgcaccgcccctgtgccctcccgggacgacgaccaagaacagcagcagcaacagccacgaccacccccctggtactaccggcacctggtggaccgcgtggcgcgccccaagcactactactcgctccggcactggcagtcgcccgacacgtccgccgacgacctcgaggcgtgctggcgccgcctggtcgaggactactcgcgcctgcgcctcagccacgaccgcgacgccttcccggccgtctcggggctcgcgcgccagatgcagagcgtccgcggacccggacccggatccggatcccccgccgcccgctacgtcgccggcctgtggaccgacacactcctgcgtggcgacctggcctggtcggtgcacctgccgcccctaataccgccccggaaagatgcagacccgccgcaggcgggccacgacaacgacaacaacgacaacggaaacgacaacaacaaccacgacgacgacgacgacgactactgggcgggggtgtcgtggggtccggcgcgggtgtgtcggccgcgcgggtggcgggcgccgtcgtggtcgtgggcgagcgtgagggcgccggtgcggttcgcggacgggcacgggcacgggcacgggcacgggcgggtcgaggcggcggggtggtgcgagatggtcgaggtccggtgcgagccggccggggcggacccgatgggggagctgcgcgagggcggcagctggctggtcctgcgcgggcgtctcgtccggacggggatgcggttccgcggtggcggcgccgccgccgagaacggagagctggggcggcggctgcagcagcagcagcagcagcagcagcagccctgggacgtgatgacgctggacatcctcgccgagggcgggtatctggccaacgtgacgttggacgacgactgccggggcctggtggcggcggacggggcgcttccgcccgtctatctcttgctcattggacgcgggaagcccgggagtgcttggttctttttgttgctggcccgggttccggaggaggaggaggcggaggatgggtactccgaggtcaggggtcgagcggcggcaggagacgggcacgtgtaccgccgtttgggtctcgtggaggtgtctggcgggcccccgagtctcgggcaggacaagggggtggacagcctgcttgggagaggggaggatgccgtcgtgaccatcgtctaa

SEQ ID NO: 4931 - protein, 877 aa, Myceliophthora thermophilia
MLQGLVGSTGEAGVGVAFIFDGEFAQLAALASPSRDSLFGHSFYFFYSVFIPPWYSAFSSDKMPWVRWNIVPATVKGKSAQHWRGRNTVGMLSGSQLPPSSGDRPRCRGCDHPRPAYTGGYTTVRSRLSTMLANAEHAGCDVCAILSEGILKFLGSEWSPLRREDADELLVDFNLAGSRRSVEVTFFQTSVKLSFFASEITPWLAENMPDLPLGNDVPSATWSDESTAWAVQQLEHCKRTHESCNSFPPAPLPSRVLDVLAHGGEGVRLYVSQGETAPYAALSHCWGRKPFLRTMSGSLEEHRNEIAWARLPRTFRDAVEFVRKLGIRYLWIDSLCIVQDDLDDWRREASRMASVYQNAAFVVSAAKAAGAYGGLYAELPPTHRPLTVRFKSGGPQERERQREQEEQQEQQREEEVVVHVRRVLSHPHRVPSPYNAPIPPLPIFTRAWIMQERFLCPRILHFGPEELSFECLESTACQCTAPVPSRDDDQEQQQQQPRPPPWYYRHLVDRVARPKHYYSLRHWQSPDTSADDLEACWRRLVEDYSRLRLSHDRDAFPAVSGLARQMQSVRGPGPGSGSPAARYVAGLWTDTLLRGDLAWSVHLPPLIPPRKDADPPQAGHDNDNNDNGNDNNNHDDDDDDYWAGVSWGPARVCRPRGWRAPSWSWASVRAPVRFADGHGHGHGHGRVEAAGWCEMVEVRCEPAGADPMGELREGGSWLVLRGRLVRTGMRFRGGGAAAENGELGRRLQQQQQQQQQPWDVMTLDILAEGGYLANVTLDDDCRGLVAADGALPPVYLLLIGRGKPGSAWFFLLLARVPEEEEAEDGYSEVRGRAAAGDGHVYRRLGLVEVSGGPPSLGQDKGVDSLLGRGEDAVVTIV

SEQ ID NO: 4932 - DNA, 1143 bp, Myceliophthora thermophilia
atggccgacgcgccagtggagagggtcctgagcgttggcggacacgatatcggctatccgcacgggcacttggggcacttgaccgaagacgaggccaatcggttgcagcaattcaagaactatcttgaagagaagggcttgtacaagcctggccctccgccgtcccatgacgaccagacactactgcgcttcctccgagctcgcagatggtcggtgaacgacgcgtacgggcagttcaaggacaccgaggaatggcgccgggcgaaccagctcgaagtcctctacgacacgatcgatgtggatgcgtatgaacagacgaggaatctataccctcaatggacaggaaggcgagataggagaggcatcccgctctacctcttccagatccgccatctcgactccaaaaccgtctcgagctacgagaaagaggccgaggcggcaaacgtcagcaaagcccagaccgacggcagcaccccgcagcgcctgctccgcctctttgccctgtacgagaacctcacccggttcgcgcagccgctctgcaccgagatgacggaccgcccgcacccgagcacgcccatcaccctcagcaccaacatcgtcgacgtctcgcaggtgtcgctgcgcatgttctggaacctcaaggcgcacatgcaggcggcctcgacgctcgcgacggcgcactacccggagacgctcgaccgcatcttcatcatcggcgccccgtacttcttcagcaccgtctggggctggatcaagcgctggttcgaccccatcaccgtctccaagatcttcatcctcaacccgaacgaggtcaagtcgacgctcgaggagttcatcgagccgcgcaacatccccaagcagtacggcggcgagctcgacttcgacttcttcgaccggcccaacgtcgatccccacatcaaggaggccctcacgtgggagaacgggtacaccgacttccccgagggccccgcctactgggtgcccgtggatggcgggcgcaagctggcttgcttggcggtggggagcaagaatggcaaggagaggagggagacggtgtgcaccatcccggtggcgtccttcaagggcgatgccgccgccaaggacgcttccgccgccgcggccggtgccgtcaacggggcttag

SEQ ID NO: 4933 - protein, 380 aa, Myceliophthora thermophilia
MADAPVERVLSVGGHDIGYPHGHLGHLTEDEANRLQQFKNYLEEKGLYKPGPPPSHDDQTLLRFLRARRWSVNDAYGQFKDTEEWRRANQLEVLYDTIDVDAYEQTRNLYPQWTGRRDRRGIPLYLFQIRHLDSKTVSSYEKEAEAANVSKAQTDGSTPQRLLRLFALYENLTRFAQPLCTEMTDRPHPSTPITLSTNIVDVSQVSLRMFWNLKAHMQAASTLATAHYPETLDRIFIIGAPYFFSTVWGWIKRWFDPITVSKIFILNPNEVKSTLEEFIEPRNIPKQYGGELDFDFFDRPNVDPHIKEALTWENGYTDFPEGPAYWVPVDGGRKLACLAVGSKNGKERRETVCTIPVASFKGDAAAKDASAAAAGAVNGA

SEQ ID NO: 4934 - DNA, 1431 bp, Myceliophthora thermophilia
atggcgtctataacccccgtctcggacaccaagaccccggaaaagaaggccgacatgttcgacagcccggacccagtgtcgcaatcccagtctgacgatgaagtgggcgaagtgcgacatgcggccctgggcgactacgagaaacaaaaggcggccgagggcgaggcccatttccaccgcctcggctggaagcgcctcaccatcgtgctgatcgtgacggcggtcgccctgggcagcctcagtctccccggcgccttcgcgaccctggggatggtggccggagtcatcatcacggtagggatcggcctcgtcgccctgtacgccagctacgtgatcggccagatgaagctcaagtacccggacatttcgcactacaccgacgtgggccgcatgatgtgtggccggttcggctacgagttcatcagcgtcatgttcgtcctgcagctcgtcttcacgaccggctcccacgtcctgacgggcgccatcatgttcggcaacctgtcggaaaacggcgcctgcaccgtcgtctttaccgtcgtctcgggcatcattctgttcctcgtcgccatcccgcccagctttgccgagatggccatcctcgggtacatcgacttcgcgtccatcatcgccgccatcttcatcaccatcatcgcgaccggcgtccgcgccggcgacttgcccggcggcgtcgggtccgttgcctggtccgcgtggccaaaggaggacctgtcgctggcggaagccttcatcgccatcagcaacatcgtctttgcctacagcttcgcgctgtgccagttcagcttcatggacgagatgcacacccccaaggactacgacaaggcggtcgtgacgctcggcgtctttgagatcttcctctacaccctcacgggcgcgctcgtgtacgcgttcgtcggtcccgacgtccagtcgcccgccctgctctcggcgggacccttggtgtctaaggtggcgttcggcatcgcgattcccgtcatcttcatctcgggcagcatcaacacgacggtggtggctcgctacatccacgggcgcgtgttcaggaactccattattcgctacgtcaacacgcccatgggctgggccacgtggatcggcctggttgccgccctcaccgtgctcgcgtgggtcattgccggcgccgtccccttcttctcggacctgctggcaatctgctcctcgctcttcgtgtcgggcttcagcttctacttccccgccataatgtggttcatgttcattaaagagggcaagtggtacgagcggaaaaactgggctttaacagctgccaatgctatcacctttatcgtgggcattgccgtgctcggtgtcgggacatattctgccatctgggacatcaaccatcggtacaagaccgggatggtttcggaccccttcagttgtgcgccccttgcgtga

SEQ ID NO: 4935 - protein, 476 aa, Myceliophthora thermophilia
MASITPVSDTKTPEKKADMFDSPDPVSQSQSDDEVGEVRHAALGDYEKQKAAEGEAHFHRLGWKRLTIVLIVTAVALGSLSLPGAFATLGMVAGVIITVGIGLVALYASYVIGQMKLKYPDISHYTDVGRMMCGRFGYEFISVMFVLQLVFTTGSHVLTGAIMFGNLSENGACTVVFTVVSGIILFLVAIPPSFAEMAILGYIDFASIIAAIFITIIATGVRAGDLPGGVGSVAWSAWPKEDLSLAEAFIAISNIVFAYSFALCQFSFMDEMHTPKDYDKAVVTLGVFEIFLYTLTGALVYAFVGPDVQSPALLSAGPLVSKVAFGIAIPVIFISGSINTTVVARYIHGRVFRNSIIRYVNTPMGWATWIGLVAALTVLAWVIAGAVPFFSDLLAICSSLFVSGFSFYFPAIMWFMFIKEGKWYERKNWALTAANAITFIVGIAVLGVGTYSAIWDINHRYKTGMVSDPFSCAPLA

SEQ ID NO: 4936 - DNA, 2130 bp, Myceliophthora thermophilia
atggacggcccctccatcatcaaggagcacggcaaggccatcatcgaggccatccgcagcagaaccctcaacaatgagtggaaagtcctcgtcgtcgacgaaaccagcaagaggatcatcgacagctccgtgaacgaagatgagatcctcaaccacaatatcgccaatatcgagcgcatcgaggaccggagggagatgaacccggacatggatgccctctaccttctctccccccagccacacattgtcgaatgcctcctcgccgacttcagctgccaccgctaccggagggggttcatcatctggaccggccccctgcctgatccgctgcagcgcaagttggatgttgctcggaggcagatgggaggccctcccgatctcttgttggtcgacttctacccgcgcgagtcgcatctcgtcaccttccgcgacccttctagcttcctcgtcctgtacaaccccacgtgcaacgacctcgtggcacagcatctgcgagcattagcatcaaagattgcctccgtatgcatcacgctgcaggagttccccaagattcggtactaccaaccgcctgcccacgccacccacgaagccagggtcctgtgcatgcacctggcccgcttcgtccagcaggcgctggaaggctaccgccagtcagacagaaacttcccgccgcacacccagcgtccccagtcggtgctcctcgtcacggacaggtctatggacttgatggccccgctccttcacgagttcacgtaccaggctatggtgcacgatctgctccccgtccgggagcaggagaacggcaaggtgacgtatcacatggccgcaaaggagagcgcccgtgtcgaagagagggacgaggaactcgccgagaaggacgtcgtatgggtcaccaacaggcaccgccacatgaaggataccatcgacaagctcatgaacgactttcagaagttcatcgacaagcacccccaatttgccaatcagggcaaagaagcgtccctgaatgacatcagagacatgctggccggtctgccgcagttcgaggagatgaagaaggcctactccctccacctcaccatggcccaggaagctatggatatcttccagaaatacaagctcgcagatgtcgcctcggtagagcagaccctggccaccggactcgacgaagactacaagaagcccaagaacatgctcgaccaggtcgtccgcctcctcgacgacccagacgtcgccccggcggacaggctgcgtctcatcgccatctacgccctgtaccgcgacggcatgatcgacaaggacatcagccggctcctatggcacgcctcgttgcagcgctcgcgcgacagccaggaccaggccgtcatcgagaatctcggcctcctcggcgcccgccccctcaaggagctcaaagagacccggcagccgatcccccccctcttcccccaaccgagttcttccaagaacgccgtcccggacgaagaatacgccctctcccgcttcgagcctgccgtcaagcagatgctcgagcgcctctgcgccggcgacctcgaccaggccctcttcccctacggctccctgcgctcggccgcgccccgctgggcctcggccaaccgcaagcaggccgagaaccgccagcgggtcatcgtcttcgtcgccggcggcgccacctactcggaggcccgcgcctgctacgaggtctcggagaagcacaaccgcgacgtcttcctcgtcaccagccacatggtggcccccggcaagtacctcgccgacctgcgcgccctcaagacggaccgccgccgcctcaacctccccatagaccgccctccgccgaagccccccgcccacctgtacgaacgtcccgcccccgtccagcccgccggcccggtccggccgcagcagcagcagcagcacattccgcccggcgctggcgtgggcggcccgccgacccaggcgcttgcgggcatgtcgctcggcggggccccgccgccgggtgtggcgggcaacggaccagggcccgcagcggcggcggcggcggtggcggcggcgggagcgggagtggatgcgggcgggaagaagaaggacaaggacaaggaaaagaagaagaggaacatctttggactaaagaagtag

SEQ ID NO: 4937 - protein, 709 aa, Myceliophthora thermophilia
MDGPSIIKEHGKAIIEAIRSRTLNNEWKVLVVDETSKRIIDSSVNEDEILNHNIANIERIEDRREMNPDMDALYLLSPQPHIVECLLADFSCHRYRRGFIIWTGPLPDPLQRKLDVARRQMGGPPDLLLVDFYPRESHLVTFRDPSSFLVLYNPTCNDLVAQHLRALASKIASVCITLQEFPKIRYYQPPAHATHEARVLCMHLARFVQQALEGYRQSDRNFPPHTQRPQSVLLVTDRSMDLMAPLLHEFTYQAMVHDLLPVREQENGKVTYHMAAKESARVEERDEELAEKDVVWVTNRHRHMKDTIDKLMNDFQKFIDKHPQFANQGKEASLNDIRDMLAGLPQFEEMKKAYSLHLTMAQEAMDIFQKYKLADVASVEQTLATGLDEDYKKPKNMLDQVVRLLDDPDVAPADRLRLIAIYALYRDGMIDKDISRLLWHASLQRSRDSQDQAVIENLGLLGARPLKELKETRQPIPPLFPQPSSSKNAVPDEEYALSRFEPAVKQMLERLCAGDLDQALFPYGSLRSAAPRWASANRKQAENRQRVIVFVAGGATYSEARACYEVSEKHNRDVFLVTSHMVAPGKYLADLRALKTDRRRLNLPIDRPPPKPPAHLYERPAPVQPAGPVRPQQQQQHIPPGAGVGGPPTQALAGMSLGGAPPPGVAGNGPGPAAAAAAVAAAGAGVDAGGKKKDKDKEKKKRNIFGLKK

SEQ ID NO: 4938 - DNA, 3507 bp, Myceliophthora thermophilia
atggaggctctgctgggcaccggccagtcgaacccgacctgcggttcgctggccgacctccaggagcaactccggcatcttcttcagagtcgcgtgaccgaaactcgcgccgaacatatttcggtggcattcgaagtccgagcgaccgcgatttttgacatccctgtgaccggcgtcgaaaatgacctgctcgggaacccctcgaacatcgacccgtcgctgggcgggtcacggtcgagcgctgctgcgccagccatcaacggtagtgcgggacagccgacccgacgagtcagcgccatcgacgccctgatcaaccagcccgtggacgacccggtgttgcagactgcgattgccaggcagatcatatcgtcggtgggcgaggccgactcgagcaactgggcagtgcggcaggtctcgcgcgctgagcagagttggacgtttgcctacatctgcaaggattcctgggaggcctggaaccgtcaggcgtcgaagacacccgcgaagacgctcatcggggagtggagcggggagggtgggcaagatcccgttcatatggcacgtccggcctttgactgccgcggatccgtcaagatcgccttcgtcaaggcgacgaaaacgatcaacgtcaaatacgagcacactcccatgcacaagacggtggggcagctgatggaactccttgcgccgccacctgttgcaccaatcgtgaagaagacacccgtcaggaaggccaaggaagcaaagacgccaaaagaagcgagaccaccgaaggaaccgaagcccaagacgccaaggtcctccaagaagcgggcagaggtgaacggcgtcccgggcggagaagctctacaacgacgacaacaacaacaacaacaacaacaacaacaacaacaacaacaacaacaacaacaacaacaacaacaacaacaacaacaacaacaacaacaacaacaacaacaacaacaacaacaacaacaacaacagcaacaccagcagcaacaccagcagcaacaccagcaacaacaccagcaacgacaccagcagcaacaccagcaacaacaacaacgacaccagcagcaacaccagcaacaacaacaacagcagcagcagcagcagcagcaacaacaacaacaacaacagcaccagcaacccgggagtttccccaatcgcctcgcagccagctggctcgagcgcgccgcagcacctgctgacgtcgaggaacatgcgcgctctgtcctcaacttacctccaggggaggcggcaaggcggcgaaaagtcgccatcaagctgctcaatgacaacaacattgacccgcagtctctcaccgcagagcagttcaatatctttgccaaccagtcccccgagctgcaacaagactccctggcaatgttgatcaaatacggcgccgagagactgcgcatagttcatcccagtagtaaggatgggtcgggccctggacagtcgactcccagcaagccggccactcctggccaggcggagaatacgccacaggcggcaagttccaaacaatcgctgatgaattctaatggaggaactgtagaagtgggcgagacacagagtcccgggctcacaggagcgaagcctaggaggcgcatctgtgaagggtgccgccttcggaagtataggggcaagtgcgacaaagcgaggccgtcttgcaacatgtgcctcgctgagggcgtcgcatgcacttatgctcctacgaggccgaggaaaagcaagaccgccgagactgatccggaagcccctgagagggctcaacaagcaacgccgaacggagggcaaggtggcgtgagttcgttgggattgcatacagcaaatccagcttcccagtcgcccggtgtgccgtttggccattcggtgaacgaagcagctccgggccaagaacattacgaagagcgtcttcagcagactgcaaccatgaccgtttcgggctcgaccacccataatcagcccgagactccctccgacgtattccatcaagcccaagacatctatcaacacccgtccggcttgagcttccctcaggcccacaccactagtaccgcggaaacggcccaaccaagcatttcgtccgcctccgttgagcccacttctacggactgcatgccgacctcggtaccagaggctccccatgccgcattccacggctttgcctaccctcagccctctgcgaaccatgaaagcatcgcagcctacgcagaacaagtggctccagctgctcagcagggccgtcatggggccgggggatctcagcctacggcacggcgcagcctcccgaccgagcaggttgcccacgggagtgggacgaatgtcgccgcaatggatggctctcagaacacttggcagtccatgtctagcacatcaagccaagcaagcatgccctcccccgaacaggctaggtctaagaagccggcgcctgtctcacaggcgtacgatgacttccgacagcagccggcttcgaactggggaaacgccagccagtccataccagcacacccagccggcaacccccaggcccaaaccagcactcaacctccacgcgccaagtcgaggcaaaataatcgggcatctgctgctgccactcagcaacccgcctcgacccaaagccatacctacgacaaccagtaccagcgtggtggctcccaacccgagccttcaagtgaccatatcccataccagccatatcccaacccagcttccaatcaaccaagttcattttcatcatctgacaattacaatgctcaagtgtcatatggcgcatcgtccacgtactcagcgacggggtcccagaacgtggcctcttcgtatccatccaatccgggtgcgacaaccagcgccgcgcagtgggggactccgacgtcaacgcctcaacctagaaacacgcatgggtacgaggcaacccaatccagcgccagcagcagtgcaccgtacaatggtggtgcttcgaatcccaggacatcgctgggtttacgaggctccagcatgcggccacagccgactcgagctggaggcccgtcaacggcctacagccaacagcaacggcagcagcagcagcaacaacaacggcagcaacaacagcaacagcaacagcaacagcaacagcaacaaaggcagcagcacggacaacaatatctcccacaatcgcaaccgcaacaggcctatcatggttacatgacccatatgagccaccaccagcagcaggccagcagcggcagttaccagaacagggggtttggcttcggggcgacagcagcgaacagcgcatcctccggctacaacaattcggcagcaggcggcggcagcggcgccgccgccaatgcctattctaccgcacctggcgcgtcgggcgggcacgggcatagcagccacgcacagcaggcgcgacatcacaacacttcaatgaacctgacgaaccacgcatacagcagcagtatcggcggcggcgacccagcgctgtacgagctgctcagaaacaacccggccggatag

SEQ ID NO: 4939 - protein, 1168 aa, Myceliophthora thermophilia
MEALLGTGQSNPTCGSLADLQEQLRHLLQSRVTETRAEHISVAFEVRATAIFDIPVTGVENDLLGNPSNIDPSLGGSRSSAAAPAINGSAGQPTRRVSAIDALINQPVDDPVLQTAIARQIISSVGEADSSNWAVRQVSRAEQSWTFAYICKDSWEAWNRQASKTPAKTLIGEWSGEGGQDPVHMARPAFDCRGSVKIAFVKATKTINVKYEHTPMHKTVGQLMELLAPPPVAPIVKKTPVRKAKEAKTPKEARPPKEPKPKTPRSSKKRAEVNGVPGGEALQRRQQQQQQQQQQQQQQQQQQQQQQQQQQQQQQQQQQQQQQQQQQQHQQQHQQQHQQQHQQRHQQQHQQQQQRHQQQHQQQQQQQQQQQQQQQQQQQHQQPGSFPNRLAASWLERAAAPADVEEHARSVLNLPPGEAARRRKVAIKLLNDNNIDPQSLTAEQFNIFANQSPELQQDSLAMLIKYGAERLRIVHPSSKDGSGPGQSTPSKPATPGQAENTPQAASSKQSLMNSNGGTVEVGETQSPGLTGAKPRRRICEGCRLRKYRGKCDKARPSCNMCLAEGVACTYAPTRPRKSKTAETDPEAPERAQQATPNGGQGGVSSLGLHTANPASQSPGVPFGHSVNEAAPGQEHYEERLQQTATMTVSGSTTHNQPETPSDVFHQAQDIYQHPSGLSFPQAHTTSTAETAQPSISSASVEPTSTDCMPTSVPEAPHAAFHGFAYPQPSANHESIAAYAEQVAPAAQQGRHGAGGSQPTARRSLPTEQVAHGSGTNVAAMDGSQNTWQSMSSTSSQASMPSPEQARSKKPAPVSQAYDDFRQQPASNWGNASQSIPAHPAGNPQAQTSTQPPRAKSRQNNRASAAATQQPASTQSHTYDNQYQRGGSQPEPSSDHIPYQPYPNPASNQPSSFSSSDNYNAQVSYGASSTYSATGSQNVASSYPSNPGATTSAAQWGTPTSTPQPRNTHGYEATQSSASSSAPYNGGASNPRTSLGLRGSSMRPQPTRAGGPSTAYSQQQRQQQQQQQRQQQQQQQQQQQQQQRQQHGQQYLPQSQPQQAYHGYMTHMSHHQQQASSGSYQNRGFGFGATAANSASSGYNNSAAGGGSGAAANAYSTAPGASGGHGHSSHAQQARHHNTSMNLTNHAYSSSIGGGDPALYELLRNNPAG

SEQ ID NO: 4940 - DNA, 357 bp, Myceliophthora thermophilia
atggcgtcccaagccgacttccgcgacaggcagttcttggctgactctgtgacgggattgctcttggcaggcattggccatgtcaccgcaccgccagacaaccagaagaatttcctggtcgtcgatgccaagacagataatgctgcgatcgaagcggcgttcgataggtttacgacggagaggaaggacattgggatagtcctgatcaaccaacacattgccgacaggatacggaaccggattgatacctatactcaagcatttcctgccgttctcgagatcccgagtaaggaccacccttacgacccggagaaggatagcgttctgcggcgagtccgccgcctgtttggcgaataa

SEQ ID NO: 4941 - protein, 118 aa, Myceliophthora thermophilia
MASQADFRDRQFLADSVTGLLLAGIGHVTAPPDNQKNFLVVDAKTDNAAIEAAFDRFTTERKDIGIVLINQHIADRIRNRIDTYTQAFPAVLEIPSKDHPYDPEKDSVLRRVRRLFGE

SEQ ID NO: 4942 - DNA, 1065 bp, Myceliophthora thermophilia
atggctaacctgacaacggcgttcaactccctactcgagggccatgaggcgccaccgacaaaatcgttcagtcttgacacggccgacgagttcttgaaggaagcgtatcggataaattctctcattgctcgtctgcattccgagctgcgcaacctgcgccaggcgtacctctcaactgctcctccgcgcaaaacacatctccgctccgcaccatcccgctctgcgcctccccaacatgtccagctcacggaccgcgaccgcgaggagattgatgcgaatgcaaagatgacactccgcgatctcaatgcccgcatccgcgctcttgaggatgccgagcagctgcggcagaataccgaggctgcgctactccggaagcgcttgtctcgtggactgagcgtgctaggatcctgggcgtccggtgacagtgctcgtagcgaacaggcagccctcgaggctgctgctcgccagctcggagcccaccgagaaggtgtgatttggtacctgtggacgaagttgcaggagactgcgcggacacaacagcgcatgatggagacccgcctgacgagggaaatggaaaagaaccggagtgttctggccaaggctaggggctcagctacgtccacggtatcatatgacaccgggaatcgcagtgttccaaaacctccagctcccgctattctcaatagcgcgaatttgtccgcacaggaagaggaggagcggaagaagccgccggtacaaagccttacggatgaacagagacagcttttcgagaagggcaaccaggacatgctcaagcaccttgaaaacaccctggacaaagtcaggacggccgagaggtcgctcatggaaattgccgagcttcagaatatgctggtcaacaatctcaccacacagtccgcccacatcgaccagttggttgccgattcgttcgagaccaccgaggacatcagcaaagggaacaaggaactcaaaaagagcgccgggaaagccagcccggcacgatacactttctttgctgctgccggactttgcacagcactaatcttgtgggatctgattgtttag

SEQ ID NO: 4943 - protein, 354 aa, Myceliophthora thermophilia
MANLTTAFNSLLEGHEAPPTKSFSLDTADEFLKEAYRINSLIARLHSELRNLRQAYLSTAPPRKTHLRSAPSRSAPPQHVQLTDRDREEIDANAKMTLRDLNARIRALEDAEQLRQNTEAALLRKRLSRGLSVLGSWASGDSARSEQAALEAAARQLGAHREGVIWYLWTKLQETARTQQRMMETRLTREMEKNRSVLAKARGSATSTVSYDTGNRSVPKPPAPAILNSANLSAQEEEERKKPPVQSLTDEQRQLFEKGNQDMLKHLENTLDKVRTAERSLMEIAELQNMLVNNLTTQSAHIDQLVADSFETTEDISKGNKELKKSAGKASPARYTFFAAAGLCTALILWDLIV

SEQ ID NO: 4944 - DNA, 1575 bp, Myceliophthora thermophilia
atgactctaacacaaagaaaaagtcaccgtgacccggatgcgttccccaccgtccagctctttgtcctagccatcgtccgcctcgccgagcccattgcgctcacctccatcttcccctatgcctgggctctcatcaagcgcttccaggtcggcaacgaagatgacgcctcgttctatgcgggcctgctcatctcggccttctccctggccgaagccctgatgggcatgtactggggcagcttgtcggatcgagttggccgcaagcctgtcctgctgctggggtgcatcggcaccatgttcagcatgatcgtggtcggcattgcccagaacatctggatcgccctggttgggcgtaccgtcggcggtctgctgaatggcaacattggcgtcatccagaccatggtcggcgagttggttacgaagccagagcatgaacctcgtgccttctccatcatgccctttgtctggagcatcggaaccatcattggccctatcattgggggtctctttgctgacccccacgagtcataccccgacctgtttcccaacagctctctcttcgaacgtttcccgtatctcctgccgaacctcatctgcgccgccatgctcctcgtgagcatcatactcggctacttcttgcttgaggagacgcaccctgacatgcagccgcgcgtactcctgccaaacgacaccttcctctcggagaacacgcccctgatcgaaacctcggacgcaatgaagcgtccggccgtcgacctccgcgacgagaactacggcaccatgcgctcgcgcgacgccgccgcctcctgtccgactcctggctggactaccaaagagggagtacgacccgcaagtgtcttctgcaagcgtatcatggccgtcgtcatctccctctcgatcttcacttatcactcgatgaccttcgaccacctccttcccatcttcttcgaggatgaccgcgccccgacctcgggcgccaccgtccacgcctccctacgcgccctctccggtctcggcgttcccggaaacagcctcctctactcacctggtggcctgggcctctccatgcaggctgtcggcgtcatcatggccgtgcaaggcgccattgccctcttcatgcaggccatcgtcttcccgctcgcagccgagcgcgtcggcgtgtaccggctgttcctgttcgttacggtgctgcatccggtcgtctacgccctcgttccctggttgctgtacgtccccgagcccttgctatacccggccatctactgcgtcttggtcgttcgcaacttcttctccatcctgctgtacccactccttctcatcctgatcaaggaggcgacgccgagctcgacgatcctgggcaaggtgaacggcctggcggctagcgcaggcgccgcgtgccggatggtggcgccgcccgtggccggatatctgtacgccttggggaagaaaatggattgtaccgcgctggcttggtacgggagtaccgtcgtcgccgttgtcggtgcggtgcagtgcttctcagttaagagggaccgagaagataatgggaagcgccccgaggatgtggaggcatag

SEQ ID NO: 4945 - protein, 524 aa, Myceliophthora thermophilia
MTLTQRKSHRDPDAFPTVQLFVLAIVRLAEPIALTSIFPYAWALIKRFQVGNEDDASFYAGLLISAFSLAEALMGMYWGSLSDRVGRKPVLLLGCIGTMFSMIVVGIAQNIWIALVGRTVGGLLNGNIGVIQTMVGELVTKPEHEPRAFSIMPFVWSIGTIIGPIIGGLFADPHESYPDLFPNSSLFERFPYLLPNLICAAMLLVSIILGYFLLEETHPDMQPRVLLPNDTFLSENTPLIETSDAMKRPAVDLRDENYGTMRSRDAAASCPTPGWTTKEGVRPASVFCKRIMAVVISLSIFTYHSMTFDHLLPIFFEDDRAPTSGATVHASLRALSGLGVPGNSLLYSPGGLGLSMQAVGVIMAVQGAIALFMQAIVFPLAAERVGVYRLFLFVTVLHPVVYALVPWLLYVPEPLLYPAIYCVLVVRNFFSILLYPLLLILIKEATPSSTILGKVNGLAASAGAACRMVAPPVAGYLYALGKKMDCTALAWYGSTVVAVVGAVQCFSVKRDREDNGKRPEDVEA

SEQ ID NO: 4946 - DNA, 1218 bp, Myceliophthora thermophilia
atgcaagctcctcctcctccgcagggtccccagggcccccatgggccccagggcgggcagatgccgcccatgatgcccagcccagagcagatcgccgccatgcaacggcagcttgcgattgacgccgaaaagatgggcatgaccgtgccgcagttcattgaacacctcaagcggcaggcgcaagaacggatgcacgcgcagcagcagcagcagcagcagcagcaagcccagcaaggcggtggccatcaacatgaacaccagcacccccaccagcaccctcatcctcaccagcaccagcaccaggacacctccggtcagccccggcccatcgttccggggccacctaaccccgtcgcgttggctctcgccaagttcctgcgcagccagaacctgaagccgcgcacttgtattctcaatggcgagcgcaaggacatgttcagggtcaaacgcgccctccgcgccctccagtccgacgcctacaaggccgcgcgcaagaagaaccccgccctccccgagatcacggaccgggcctcgctcgagaatgccttcaagctcctgccgctgtcgatgctggccctgcgcgtggtcaaggcagacccgcacgacggccacgaccacgccaagaagcaaggcggcaagcggatcaagggcctgtggacggtgcgcatcgagccgcagcaggacgccggcgacgacatgtactacgtctggctgtgggagggcagccaggtgatgcgcaaggtgtacgccggcctcgccctggccgtcatcttcgccctcgtctgctacccgctgtggcccgtcaagctgcgccagggcggctactacctcagctggggtttcttgtgcttcatgggcctgttcttcgccatggccatcttccgcgtcattctcttctgcctgacgtactttatcctgccgccgggcctctggctcttccccaacctgtgggaggatgtctcggtggtggacagcttcaagcccgtctgggcgtggcacgagcctgcgagcaagaagaagaaaaagaagaagagtaagaagtcggagaggtcggcgagtggctcggcagctgccggagcgactttttccgccactaccggacagcctgcccctgcgactgctactactaccgcgacttctacgcaggtatccacggctccgcagcaacgtagtaactacatggcgccgagggtggaggagctggaggatgacgagtga

SEQ ID NO: 4947 - protein, 405 aa, Myceliophthora thermophilia
MQAPPPPQGPQGPHGPQGGQMPPMMPSPEQIAAMQRQLAIDAEKMGMTVPQFIEHLKRQAQERMHAQQQQQQQQQAQQGGGHQHEHQHPHQHPHPHQHQHQDTSGQPRPIVPGPPNPVALALAKFLRSQNLKPRTCILNGERKDMFRVKRALRALQSDAYKAARKKNPALPEITDRASLENAFKLLPLSMLALRVVKADPHDGHDHAKKQGGKRIKGLWTVRIEPQQDAGDDMYYVWLWEGSQVMRKVYAGLALAVIFALVCYPLWPVKLRQGGYYLSWGFLCFMGLFFAMAIFRVILFCLTYFILPPGLWLFPNLWEDVSVVDSFKPVWAWHEPASKKKKKKKSKKSERSASGSAAAGATFSATTGQPAPATATTTATSTQVSTAPQQRSNYMAPRVEELEDDE

SEQ ID NO: 4948 - DNA, 813 bp, Myceliophthora thermophilia
atggcaaatgagcgtgaaagcaagaccttcctcgcccgcctttgcgagcaggccgagcgctacgatgagatggtcacgtacatgaaggaggttgccaagctcggtggcgagctgagtgttgacgagcgcaacctgctctcggtcgcctacaagaacgttgttggtacccgccgtgccagctggcgcatcatctcctcgatcgagcagaaggaggagtctaagggctccgagaagcacgttgccaccatccgggaataccgccagaagattgagaatgagctggagaaggtctgccaggatgtccttgaggtcttggacgaatccctgatccccaacgccagcacgggggagtctaaggtcttctatcacaagatgaagggcgactatcaccgctatctcgccgagtttgcctcgggcgagaagcgcaaggttgccgcgaccgctgcccacgaggcttacaagagcgccaccgatgtcgcccagactgagctgacccccacccacccaatccgccttggcctcgccctcaacttctcggtcttctactacgagattctgaactcgcccgaccgcgcctgccacctggccaagcaggcctttgacgacgcgatcgccgagctcgactcgctctcggaggagtcgtaccgcgacagcaccctcatcatgcagctgctccgcgacaacctcactctctggacctcgtccgacaatggcgagcccgagggcgccgtcgagccccccaaggaggagaaggccgacgcccccaaggaggccgacggccaggccgaggagcctgcgcccgagcaggcgtaa

SEQ ID NO: 4949 - protein, 270 aa, Myceliophthora thermophilia
MANERESKTFLARLCEQAERYDEMVTYMKEVAKLGGELSVDERNLLSVAYKNVVGTRRASWRIISSIEQKEESKGSEKHVATIREYRQKIENELEKVCQDVLEVLDESLIPNASTGESKVFYHKMKGDYHRYLAEFASGEKRKVAATAAHEAYKSATDVAQTELTPTHPIRLGLALNFSVFYYEILNSPDRACHLAKQAFDDAIAELDSLSEESYRDSTLIMQLLRDNLTLWTSSDNGEPEGAVEPPKEEKADAPKEADGQAEEPAPEQA

SEQ ID NO: 4950 - DNA, 1311 bp, Myceliophthora thermophilia
atgccagcaaagtcgaggtttacgagactagacgccttcaccaagacggtggaagatgcgcgcattaggacgacctcaggtggcatcgtcacgatagtgtcgctcattgtggtattcttcctcgccttgggcgagtggtccgactaccgcaggatagtggtgcatccagagctgatcgtcgacaagggcagaggcgagcgcatggagatccatctcaacatcactttcccccggattccttgcgagttgctcacactcgatgtcatggatgtctcgggagagcagcagcacggcgtacaacacggtatcaccaagacgaggctgcggccgctaagcgagggcggcggtgacattgactcgaaggagatcgtcctgcattcccgcgacgaggccgccgtccaccttgacccaaactactgtggcgagtgctatggcgccccgcccccaaacaatgcgaagaagcccgggtgctgcaacacatgcgacgaagtcagagacgcatacgcgcaagcctcgtgggccttcggtagaggcgagggcatcgtgcagtgcgagcgcgagcactacagcgagaagttggacgcccagcgcaacgagggctgccgcatcgagggtggactgcgcgtcaacaaggtggtgggcaacttccacattgcgcccggccgcagcttcagcaatggcaacatgcacgtgcacgacctcaagaactactgggactcgccgaccaagcacacattcacgcacacgatccatcacttgcgcttcggcccgcagctacccgagtcgctgacccagaagctgggtaccaagaacctgccgtggaccaaccaccacgtcaaccctctcgacgacacccaccagcagacggacgacgtcaactacaactacatgtacttcctcaagatcgtgcccacctcgtacttgcccctcggctgggagaagacatgggccggcttccgcgagcggcactccgcagagctcggctcctttggcacctcgcccgacggtagcgtcgagacgcaccagtactcggtcacgagccacaaacggagtctggccggcggcaacgacgctgccgagggtcaccaggagcggcagcacgcgcgcggcggcatcccgggggtgttcttctcttatgacatctcgcccatgaaggtcatcaacagggaggagagggccaagagcttccttgggttcctcgctggtttgtgtgccattgtgggaggcaccctcacggtcgccgcggctattgatcgtgctctgtttgagggtaccgtccggctcaagaagctgaggtctaaagatctctga

SEQ ID NO: 4951 - protein, 436 aa, Myceliophthora thermophilia
MPAKSRFTRLDAFTKTVEDARIRTTSGGIVTIVSLIVVFFLALGEWSDYRRIVVHPELIVDKGRGERMEIHLNITFPRIPCELLTLDVMDVSGEQQHGVQHGITKTRLRPLSEGGGDIDSKEIVLHSRDEAAVHLDPNYCGECYGAPPPNNAKKPGCCNTCDEVRDAYAQASWAFGRGEGIVQCEREHYSEKLDAQRNEGCRIEGGLRVNKVVGNFHIAPGRSFSNGNMHVHDLKNYWDSPTKHTFTHTIHHLRFGPQLPESLTQKLGTKNLPWTNHHVNPLDDTHQQTDDVNYNYMYFLKIVPTSYLPLGWEKTWAGFRERHSAELGSFGTSPDGSVETHQYSVTSHKRSLAGGNDAAEGHQERQHARGGIPGVFFSYDISPMKVINREERAKSFLGFLAGLCAIVGGTLTVAAAIDRALFEGTVRLKKLRSKDL

SEQ ID NO: 4952 - DNA, 687 bp, Myceliophthora thermophilia
atggccaacccactcgacaccgacgccggcaccgagctgttcaagcactatgaaaccgaattccagctggtccaggcagatctggtgcagaagctcgaccagatttcggagctgtcaggggagccgaggaaggcggcaatgagcgcggcggagcgggcgctggaagagacgggcgagctgctcgaccagatgcagatggagaagcagaacatgccctcggcacagcgggccgccatcaatcggcgattgcgcgactacaagacggatgtggatggctatcggcggaggctgcgtaccctggcggatgacaagagcgctctgttcggagcccggtactcggacaacccgagctcctcgtcaagggacgctcactatgagcaaaggcagcagttgctgtcagggactgagcggctggaccgcagcacacagcgactcaaggccagccaggcgttggcaaacgagaccgaggcgatcggagccagcacgctcgcacagctgcaacagcagcgcgagaccatcgagcacaccaccagcgtcctctatgagagcgaaggctatgtcgaccgcagcatcaagagcctcaaagggattgcccgtaggatggccacgaatcggataatcaccgttgccattattacggttttggttcttcttatcattgcggtcattttcagcaagttcaaatga

SEQ ID NO: 4953 - protein, 228 aa, Myceliophthora thermophilia
MANPLDTDAGTELFKHYETEFQLVQADLVQKLDQISELSGEPRKAAMSAAERALEETGELLDQMQMEKQNMPSAQRAAINRRLRDYKTDVDGYRRRLRTLADDKSALFGARYSDNPSSSSRDAHYEQRQQLLSGTERLDRSTQRLKASQALANETEAIGASTLAQLQQQRETIEHTTSVLYESEGYVDRSIKSLKGIARRMATNRIITVAIITVLVLLIIAVIFSKFK

SEQ ID NO: 4954 - DNA, 1992 bp, Myceliophthora thermophilia
atggacgagaagcccaacaacggcgccggcactggtgcttcgttggcaatggcgacacctattggcaatgccgatcactcacttcccagggccagcgataacctgtctggctcccagagcagcgcccagggctcaccggcccatgagcacgagccgacggcaatcctgcctggggccaaggaacctcgaaaggacaaaggcgaaagggagccgcagtcgctcgacgagctctccaaggatcctcttcggacccatcgtgactggtaccccaagtacggtcgagtgcaaaagtgcgactggtgcaacgctcgctccgaaggcactctccatgtctgcgctacgtgttccatccgcatgtgcgaaaagtgcgcccgggaccgccgctgggacaagaactactcccactttatcgacgccgatgccctcgactggaagccgaaggcagggcccaaggcgcccagagcaccaaaggcacccaaggcgcccaagaagggctcgtccaagcgcccggcccggaacaaggagccgtcagatcccccgccgcgtcgtcgcaagataaagaagactgtgggtggctcgggagcggatggggacaatctcacgagccaggacggcgacaattttgccaacttgggcttccacagcagccgccattttcccgcacccaccgcgcccaccgcgcccaccacttcccatcacgactttgctgcccctctccagccgccggcgcccagcgactactatggccacgatccgggtgctcctcctccctaccaccagacctccatatatggtggctaccctccccttccccggatggatccggccgctttccctacctaccacgggctcccggctccggccatgacgaacacgcccgctgcagagcctccagtccgctcgaacgggcgcaaggcggccactagggccaagttgaacataagagagcagtcccgtcacctctccagcggccgactcgacggcggcgaggctgccgaggacgtcgacgacgagtacgcccagattcagcaccatcaagacgacgaggatccctctgtagaattgggggacgccgagaacgtaaacagggcgagccgtcgccgcgatgatcgtgagatggtcgacaacaccagaacccgctccatcattcctggcaccggcaccgaccgcgacgacgcccagtcagccctagccggtgcaccaccgggccctctccctccttgggccgactaccgtgagcacgacctcctggttgtcgacatttacagctccatctacggagacaggctcagccttgacttctaccgtgtccgcacgcagatccccaatcactggaccggcggctggcagacctcggcttcgcagtaccacggtgaaccgaggccctacactcataacgcctactaccctgctcataaccacccagcgggccacgcgtatgagcatcacgcgaacgatgttcacgccgcaaccgaccgcgctcaccaccaacacatgtatccgcaccaccactccagctaccagcactatcccgagtaccagcagtacccgagtccctacccgcccggcccgaaccccaacccgtacgagatggcggccgcccacgacctcgagcgggtgcagcaggtggaccaggcgaccctggacgagatgcgcggcgcgtgggcgtgcaacccggtcctcaaccggctggtgagcgacaaccatcgcgtctacgcgctcgacctgctgtgggatgtcttcgagctgcgccgctcccgcgtgccggtgcgcgacgactcccagaccgtccgctggttcgtccacgagcgtcacgcccagttccgcttcgagcacgccgagctcgcccgccgccaggcccacgccggcgccgttccaccccgccgtaccgcgcccgcaaacccggctcccatcgcccccgttcccgacggcgcggactcggaccacggcgacaacgtccacgacaacggtggtgacacggacagggagtaa

SEQ ID NO: 4955 - protein, 663 aa, Myceliophthora thermophilia
MDEKPNNGAGTGASLAMATPIGNADHSLPRASDNLSGSQSSAQGSPAHEHEPTAILPGAKEPRKDKGEREPQSLDELSKDPLRTHRDWYPKYGRVQKCDWCNARSEGTLHVCATCSIRMCEKCARDRRWDKNYSHFIDADALDWKPKAGPKAPRAPKAPKAPKKGSSKRPARNKEPSDPPPRRRKIKKTVGGSGADGDNLTSQDGDNFANLGFHSSRHFPAPTAPTAPTTSHHDFAAPLQPPAPSDYYGHDPGAPPPYHQTSIYGGYPPLPRMDPAAFPTYHGLPAPAMTNTPAAEPPVRSNGRKAATRAKLNIREQSRHLSSGRLDGGEAAEDVDDEYAQIQHHQDDEDPSVELGDAENVNRASRRRDDREMVDNTRTRSIIPGTGTDRDDAQSALAGAPPGPLPPWADYREHDLLVVDIYSSIYGDRLSLDFYRVRTQIPNHWTGGWQTSASQYHGEPRPYTHNAYYPAHNHPAGHAYEHHANDVHAATDRAHHQHMYPHHHSSYQHYPEYQQYPSPYPPGPNPNPYEMAAAHDLERVQQVDQATLDEMRGAWACNPVLNRLVSDNHRVYALDLLWDVFELRRSRVPVRDDSQTVRWFVHERHAQFRFEHAELARRQAHAGAVPPRRTAPANPAPIAPVPDGADSDHGDNVHDNGGDTDRE

SEQ ID NO: 4956 - DNA, 720 bp, Myceliophthora thermophilia
atggcgacaacggcaggtcagggctgggcccagctgaggcaacaagcccgatcattagaaacacagaccgaggcattgctccagacatatgcgcagttctcggcgcaaacagccataccggcgaagccgacggaggaagagaagaatgcggaagcaagggtgcaggagctgctcgacaaggcaagtgcccaacagggttcaagaggagacggcaaccgcgagaccgtcatcgcccaactcggccgcctcctcgactcggaagcgactctgacctcgtcggcactcaaacagaataacctcgcgctactccgcgacaagctctcggaccaccggcgtgacctatcccggctgcgagcgacgctcaaggaggcgcgtgaccgggctaacctgctgggaagcgtgcgcgaggacatatcggcctaccgggcggcgaatccggaagcggccgaggccgagtacatgctgggcgagcgggcgcggctggaccgcacccacgacgtggccgacagcgtgctgagccaggcgtacgaggtgcagaacagctttgcgctacagcgcgagaccttggccagcatcaaccgacgcatcatcctggccgcgagccaggtgcccgggatcaacaacctcatcgggcgcatctcggccaaaaagaggcgagatgggattatcatggggtcctttattgccgtgtgctttttggttttctggttcttcctctaa

SEQ ID NO: 4957 - protein, 239 aa, Myceliophthora thermophilia
MATTAGQGWAQLRQQARSLETQTEALLQTYAQFSAQTAIPAKPTEEEKNAEARVQELLDKASAQQGSRGDGNRETVIAQLGRLLDSEATLTSSALKQNNLALLRDKLSDHRRDLSRLRATLKEARDRANLLGSVREDISAYRAANPEAAEAEYMLGERARLDRTHDVADSVLSQAYEVQNSFALQRETLASINRRIILAASQVPGINNLIGRISAKKRRDGIIMGSFIAVCFLVFWFFL

SEQ ID NO: 4958 - DNA, 1449 bp, Myceliophthora thermophilia
atgaccgaagttaccacctattcccaaaggcatccctttgaagcctccaacccacgactgctcgcgccagcccctggctttcagacccttagcatctccaacccgaacagcgaaatggtctaccacagcgaaggttactacgcattccaagcaccgcccaggcctccgttggagccgcgctcatcctccgtctcatccgcctcttcttccggatcctcttcggtgccatacagcaccgttccgcccgacaatgtcggcgccgtccgtaccgtgtcacccgcatccagcacttcttccgattcggggacgggcgccatggtatattcgagaaatcattgcccggcaatcgcccacgagcagccgtttgcgttccgtgcgcatccgctgccgtcacaactcctccaagcacaagctccttcttcgcttcccttctacccgtcatcgtaccagacttcgagggatgtctcgcggccgtcgccctacggcgcctactccgtcgatgctctgcaccaccaaccgccgtcgttctcctacgagacctggcatcccatgtttgcttcgaccgcgccatgccactcctctcaaccctcgacttcatatcaggtccgaccgcggaacaacgatgcgaactggtttctcaacggtatgcgaaggctcccgcccgacgtcatccgccgcatccagaagtatgtgacgtggtaccactgctggaaggccaccagaatctgccagtggttcttgcacaacttccacccggataacttcagtcatgaatggaaagtggccgaaatattgaacaccgagaggaacagaggccacgaacctttggatgacgaacctggggacacgcctgagcagaagaaacccggcaaagacttcaatttcttcgcgtgttaccattgtttccgtttcaagggattcgatcagttcgaggcccaaaaacacactccattggtcttcagagaagaggacgactctgaagaagccagcggtactacgaatgccttaacaacaacaaagaagcgagagcagtcctcaaccctttcgtcaccaagccggtcgccgcccgccaacccacactacgaccccagcctgacgcggagcagcctgcgagctgcctcctcctcctcatcatcatcgtcgtcttcctcctctacagccggccgaggtcgccgtgcagtaggcggtggcggcagccccgccgcgagcgacgacccattcgcacacatgcacccgcgcgcaaagaggacgtacggccagcggcgcttctgcgtcgactgcggcctcaaggcgggtttctacgagccgggggacttgattgagctgcagaaaccgcgcaagaagggcgacgccatgtgggtatgtcggtgcaggaaacttcactcccgcatggacagcgctcagtgccacgtgtgcaactcgatcgcgccgctgtcggtaccgaggtga

SEQ ID NO: 4959 - protein, 482 aa, Myceliophthora thermophilia
MTEVTTYSQRHPFEASNPRLLAPAPGFQTLSISNPNSEMVYHSEGYYAFQAPPRPPLEPRSSSVSSASSSGSSSVPYSTVPPDNVGAVRTVSPASSTSSDSGTGAMVYSRNHCPAIAHEQPFAFRAHPLPSQLLQAQAPSSLPFYPSSYQTSRDVSRPSPYGAYSVDALHHQPPSFSYETWHPMFASTAPCHSSQPSTSYQVRPRNNDANWFLNGMRRLPPDVIRRIQKYVTWYHCWKATRICQWFLHNFHPDNFSHEWKVAEILNTERNRGHEPLDDEPGDTPEQKKPGKDFNFFACYHCFRFKGFDQFEAQKHTPLVFREEDDSEEASGTTNALTTTKKREQSSTLSSPSRSPPANPHYDPSLTRSSLRAASSSSSSSSSSSSTAGRGRRAVGGGGSPAASDDPFAHMHPRAKRTYGQRRFCVDCGLKAGFYEPGDLIELQKPRKKGDAMWVCRCRKLHSRMDSAQCHVCNSIAPLSVPR

SEQ ID NO: 4960 - DNA, 825 bp, Myceliophthora thermophilia
atgatgtcctcaacgaacgaggaggatccgttcctccaggtgcagcaggacgtccttacccagctccagacggcccgttccctcttcacctcctacctgcgaatccgctccctcgcgacatccccgacgtcgccggaactcgcctcggcacggtccgacctcgagtcctccatcgcctcgctcgccgaggacctcgccgacctcgtcgagtccgtccgggtggctgagtccgacccggcgcagtatggactctcggccgccgaggtcgcgcgtcgcaagcgcctcgtgcaggaggtcggcggcgaggtggacgatatgcgcgaggagctggccaaggtttcctcttctggcacggcagccgccacgcgccgcggtcagaaaggcacggttggaggaggaggaggaggaggagggagcggtgccgacgacctcccagacccgtcgtcctttgccattcctgacggggagaccgacggcaccgggggtatcaatgactacgcagccgagtttgaacgcgagcagcaggctgtcctgatgcgagagcaggacgagcacttggatggagtcttacagaccgtgggaaatctgcgaaggcaggccggcgacatgggacgggagctggacgagcaggtggagatgctcgaggtcgtggaccatctcgccaaccgtgtcgagggcaggttgcaaaccggaatggagaaactgaaccacggctgggatgcgccgcagcgcgtggcatattcccagaacctctgtgagtacgtctatctggtccaacaatgcggatatgaccaagtgtcagatcaaccccggcaccagaggtaa

SEQ ID NO: 4961 - protein, 274 aa, Myceliophthora thermophilia
MMSSTNEEDPFLQVQQDVLTQLQTARSLFTSYLRIRSLATSPTSPELASARSDLESSIASLAEDLADLVESVRVAESDPAQYGLSAAEVARRKRLVQEVGGEVDDMREELAKVSSSGTAAATRRGQKGTVGGGGGGGGSGADDLPDPSSFAIPDGETDGTGGINDYAAEFEREQQAVLMREQDEHLDGVLQTVGNLRRQAGDMGRELDEQVEMLEVVDHLANRVEGRLQTGMEKLNHGWDAPQRVAYSQNLCEYVYLVQQCGYDQVSDQPRHQR

SEQ ID NO: 4962 - DNA, 648 bp, Myceliophthora thermophilia
atgattcgctcaacacaaatcgcgaggctagacggcctcatgctctgcgcctccgtagacgattccgagaccgaacaagccctctccgaagtgaagagccaagtcaaactgatcctgcggcgcctcggccgcaactcggagccgcaggcgacgatcgagagcggcgcctacgcgctgcactacctcatctccgccgatatcgtgtacgtggccatcacggaccgcagctacccgcgcaagctggccttcacctacctgttggacctggcgggcgagttctcgacgacgtacccgccccagcagctgctcagccccgtgctgcgcccgtacgccttcatggagttcgacaccttcatcagccggaccaaggccacctacagcgacgcccgcgccacccagaacctcgacaagctcaacgacgagctgcgcgacgtgacaaaggtcatgaccaagaacatcgaggacctgctctaccgcggcgacagcctggagcgcatgggcgagctgagcagcaggttgcgcgacgacaccaagaagtacagaaaggctgccgtcaagatcaattgggacctgatgatgaagcagtacggaccgttcggcgtcctggggctcatcatgctgatctttatatggtggaggttcttctga

SEQ ID NO: 4963 - protein, 215 aa, Myceliophthora thermophilia
MIRSTQIARLDGLMLCASVDDSETEQALSEVKSQVKLILRRLGRNSEPQATIESGAYALHYLISADIVYVAITDRSYPRKLAFTYLLDLAGEFSTTYPPQQLLSPVLRPYAFMEFDTFISRTKATYSDARATQNLDKLNDELRDVTKVMTKNIEDLLYRGDSLERMGELSSRLRDDTKKYRKAAVKINWDLMMKQYGPFGVLGLIMLIFIWWRFF

SEQ ID NO: 4964 - DNA, 900 bp, Myceliophthora thermophilia
atgcccaccatggatccgtactcggccgagggcgagctgatcaacatccacaaccacttccaccagggccagtaccaggaagtggtcgacttcgacgtgtcgtcgctgtcccccgagaacgcgctgccggcgcgcgtgctgcagctgcgcgcccgcgtcgccctgggccaggccgaggacgtgctcgcagaggtgcagggcgaggcggacggcgtgcccgagctggccgccgtgggcgccctggccgagcaggcgctgggccgcggcgaggccgccgtcgagacgatcgagaagctcgcccagagcgcgggcgacaacccgaccgtgcaggtcctgggcggcaccgtactgcaggcggccggcaagtctgaggaggctctcgcgctgctgggtcggcatcaagggagcttggatgccgttgcgctcatcgtgcagatccatcttcaacagaacaggaatgaccttgccgtcaaggaggttgctgccgcccggcgatgggctcaagatagcctgctggtgaatcttgcggagtcatgggttggcttgaggcttggcggcgagaaatatcaacaagcgttctacgtcttcgaggaactggcacaggcgcccgcgacatcatcagtacagtctctggtttctcaggccgtcgccgagctgcacctcggccgcgttgaggaggcacaagccgcgctggagcaggcgctgaagaaggaaccaggatacgcggaggccatcgccaatctgttggttctgagcgtgattgctggcaagagcgccgaggagctgacgagctctcttcaaaaggccaaccctgatcatccccttttggtcgacctggccgagaagagcgacctcttcgatagagccgcgacaaagtataaggcgaaggtggcagcgtag

SEQ ID NO: 4965 - protein, 299 aa, Myceliophthora thermophilia
MPTMDPYSAEGELINIHNHFHQGQYQEVVDFDVSSLSPENALPARVLQLRARVALGQAEDVLAEVQGEADGVPELAAVGALAEQALGRGEAAVETIEKLAQSAGDNPTVQVLGGTVLQAAGKSEEALALLGRHQGSLDAVALIVQIHLQQNRNDLAVKEVAAARRWAQDSLLVNLAESWVGLRLGGEKYQQAFYVFEELAQAPATSSVQSLVSQAVAELHLGRVEEAQAALEQALKKEPGYAEAIANLLVLSVIAGKSAEELTSSLQKANPDHPLLVDLAEKSDLFDRAATKYKAKVAA

SEQ ID NO: 4966 - DNA, 1143 bp, Myceliophthora thermophilia
atgaacggctacgacgagaagcaccacctcgacgaggacgccttcggcccaaaaggcagcatcgtcaaggcctttgacgcattcccaaaggcaaaaccgcagtacgtccagcacacgtcggcgggcggcaagtggaccgtggccatggcgttcatctcgctgatcctgttttggtcggagctggcgcgctggtggcgcggcaccgaggagcacaccttcgccgtcgagaagggcgtgtcgcacgtcctgcccatcaacctcgacgtggtggtgcgcatgcgctgcgccgacctgcacgtcaacgtccaggacgccgccggcgaccgcatcctggccgccagcgccctccgccgcgacccgaccctgtgggcgcactgggtcgacggcaagggcgtccaccgcctcggccgcgacgcccagggccgcgtcatcaccggcgagggctacacgggcgccgaccacgacgagggcttcggcgaggagcatgtccacgacatcgtcgccctcggccggaagagggccaaatggagccgcaccccgcgcctctggggggccgaggccgatagctgccgcatctacgggagcctggagctcaacaaggtccagggcgacttccacatcacggcccgggggcacggatacatggagtttggcgagcacttggatcacaatgccttcaatttctcccacatcatctcggagctctccttcgggcccttcctgccctcgctcgtcaacccgctcgaccgcaccgtcaacacggcgccggcccacttttacaagttccagtacttcctgtccgtggtgcccaccacctacagcgtcggccacccggaggagcgcggctcccgctccgtcctgaccaaccagtacgccgtcacggagcagagcaaagccgtccccgagaacacggtgcccggcatctttgtcaagtacgacatcgagcccatcctgctcaacattgtcgagacgcgggacagcttcttcgtcttcctcatcaaggtcatcaacgtggtcagcggcgtgctggtgacgggccattgggggtaccgcttgaccgactgggcgagggaggtcctgggccggcgtcggagagggcatagcgacggcgtattgggaaagacggctcatcttgaagagtag

SEQ ID NO: 4967 - protein, 380 aa, Myceliophthora thermophilia
MNGYDEKHHLDEDAFGPKGSIVKAFDAFPKAKPQYVQHTSAGGKWTVAMAFISLILFWSELARWWRGTEEHTFAVEKGVSHVLPINLDVVVRMRCADLHVNVQDAAGDRILAASALRRDPTLWAHWVDGKGVHRLGRDAQGRVITGEGYTGADHDEGFGEEHVHDIVALGRKRAKWSRTPRLWGAEADSCRIYGSLELNKVQGDFHITARGHGYMEFGEHLDHNAFNFSHIISELSFGPFLPSLVNPLDRTVNTAPAHFYKFQYFLSVVPTTYSVGHPEERGSRSVLTNQYAVTEQSKAVPENTVPGIFVKYDIEPILLNIVETRDSFFVFLIKVINVVSGVLVTGHWGYRLTDWAREVLGRRRRGHSDGVLGKTAHLEE

SEQ ID NO: 4968 - DNA, 1086 bp, Myceliophthora thermophilia
atgtcctataacccctacaatcaggggcctggtgccgaggcgggctacggctatggccagacggaacagcatgagatgcaaccgtacggtcagcagccctatggctcgccgcagcagcaatatgggcagcagtacggtcagcagtatgggcagcagtatgggcagcagtatggatcacatcccgaggggcagcagtacggtcagcagggccagtacggttcgccccagccgcagcaaccaggcgggaacgtcctgtcgcagaccgaatatctgcagcgtgtgtcggccattcgccgagagatcgagggcctgacgaccagcattcataacatcgcaacgctgcaccagcaagctctggccagcagtgacaacgcggcgcgtcaggcgttggacgacctcgttgcgtcgacgcaattgaagaacacggcgattcgtgggcagatccagcagctcaaggcggacacggagcgcacgacggacactaatctcttcaataccaagaagaggcagtttgagattctcaatgacgacttcaaaaagaaaatccaggagctgctgcaggaggagcagcagtacaaggcgcgctaccgcgagcagattgcccgccaataccgcatcgtcaacccggacgcgaccgaggagcaggtgcagcaggcggccgacgccgactggggcgacgaggggattttccagactgccctccgaaccaaccgctccggccaggcctcggccgtcctgggaaacctgcgggcgcgccacaatgacatggtcaagatcgagcaagatatcatgcagctggtcgagctgattgagctgctcaaccagcagatcgtgcagcaggagcccatgatccaggccatcgagcagaagaacatggagacggccgaccacctcggcggcgccaacgtgcatctccaagaaggcgtcgccagagcacggcgcgcccgcaagctcaagtggtggtgcttcggcgtgtgcgtcctgatctgcatcgcgatcgccctcggtgtcgggctgggcatcaccctgacgaaccgaggtggcggcggcggtggcggtggtggtggcggtggcagtaacaactga

SEQ ID NO: 4969 - protein, 361 aa, Myceliophthora thermophilia
MSYNPYNQGPGAEAGYGYGQTEQHEMQPYGQQPYGSPQQQYGQQYGQQYGQQYGQQYGSHPEGQQYGQQGQYGSPQPQQPGGNVLSQTEYLQRVSAIRREIEGLTTSIHNIATLHQQALASSDNAARQALDDLVASTQLKNTAIRGQIQQLKADTERTTDTNLFNTKKRQFEILNDDFKKKIQELLQEEQQYKARYREQIARQYRIVNPDATEEQVQQAADADWGDEGIFQTALRTNRSGQASAVLGNLRARHNDMVKIEQDIMQLVELIELLNQQIVQQEPMIQAIEQKNMETADHLGGANVHLQEGVARARRARKLKWWCFGVCVLICIAIALGVGLGITLTNRGGGGGGGGGGGGSNN

SEQ ID NO: 4970 - DNA, 1902 bp, Myceliophthora thermophilia
atgcacatgcacattgcttcccagagggccgccattcccgatgtccccgtaatatacttggtcgagccgacaccagcgaatttgcaggcgatcacaaatgacctccaaaagggactttacagctctgcccacctcaacttcctctcctcgataccgcgacccctgttggaggactttgccgcgcaaacggctgctgcgggtacctctgaacagatcgcacaagtgtacgatcaatatatcaacttcatcgtcaccgaaccagatctgttcagcctcggcatgcagaaggagcatacatactgggccttgaacagtgcgaaaacaaaagatgaggagctggaccgtgtgatagaccgaatcgtcagcggcctattcagcgtggtggtgacatcgggagtgatacctatcattcgctgccctagaggtgctgcagccgagatgactgcagccaaacttgaccgcaagcttcgagatcatgtggttaattccaaggacaacctcttctcatcacaagcgcgatccggcccttcagccgcaggaacgcccacctccagacctgttctcatcattcttgatcgtaacgttgacctgatacccatgctgtctcactcctggacataccaaagcctttgttttgacatcttcaagtccgagttgaaccgcattactatcgaaacccccgtcgattccagcaatccagcgaaaggggtctcgaagaagacatatgacctcgccgccaacgattttttctgggccaaaaatgcatgcttgccatttccacaagtcgctgaagatatcgatgccgagctcacgaaatacaaggaggaggcggaggctatcacgaaaaagacgggagtcagcaacttcgaagatcttcagcatgacacgaatgcaagcgcgcagcacctgaaggcggccattacccttctcccagaacttcgagaaaggaaagcgacgctcgacatgcacatgaacatcctcgccgcggtcttgggggagatccagaaccgccagttggataattacttccaattggaagaaaatgttatgaagcagagcaaagcgcagatgttggagttgatcaaggcggacaacaaaggccaaccaacagataagctccgattgtttgtgatttggttcctcagcaccgagcaggacgtgtctcgacaagaatgggcgcagtttgaagaggccttggaggcagcgggatgcgacaagacatgcctggcatatatccgacaagtccgagcaaccaccaagatgacacagctcaccaccgtcactaaccaagcggcggcaagtcagcaacagtccggatcttcagatcttttcaaccgcttctcggctatctcaacccgtctcacagaccggctcaaagagacgggcgttccgaccaatgcgttgacatccaatgttgcctctcttctcggcgggatcaagaacttcctgcctgccgacaaggacctcactgttaccaagatcaccgaatcaattatggacccgtcgagtgcgagtacatcggctattgccaagaccgagaattacctctactttgacccccggagcgcgaatgcgcggggcaccatgcctcagccatcagcactgcgggcgggaacaggcggagccacggcgccgggtggactccctgggtcggcgcttggcgcaccgatggccgggactggggccaccttcggccagcggagacagggcttctcggaagccattgtgttcatggtcgggggcggatctatggatgagtatggcaacttgcaggagtgggctgcccgcacggctggcggagatcgggccaagagaagggtcatctacggcgccagcgagctaatcaatgccgggcagtttatcaaggaggagctgaacaaattgggaagggagatatcttga

SEQ ID NO: 4971 - protein, 633 aa, Myceliophthora thermophilia
MHMHIASQRAAIPDVPVIYLVEPTPANLQAITNDLQKGLYSSAHLNFLSSIPRPLLEDFAAQTAAAGTSEQIAQVYDQYINFIVTEPDLFSLGMQKEHTYWALNSAKTKDEELDRVIDRIVSGLFSVVVTSGVIPIIRCPRGAAAEMTAAKLDRKLRDHVVNSKDNLFSSQARSGPSAAGTPTSRPVLIILDRNVDLIPMLSHSWTYQSLCFDIFKSELNRITIETPVDSSNPAKGVSKKTYDLAANDFFWAKNACLPFPQVAEDIDAELTKYKEEAEAITKKTGVSNFEDLQHDTNASAQHLKAAITLLPELRERKATLDMHMNILAAVLGEIQNRQLDNYFQLEENVMKQSKAQMLELIKADNKGQPTDKLRLFVIWFLSTEQDVSRQEWAQFEEALEAAGCDKTCLAYIRQVRATTKMTQLTTVTNQAAASQQQSGSSDLFNRFSAISTRLTDRLKETGVPTNALTSNVASLLGGIKNFLPADKDLTVTKITESIMDPSSASTSAIAKTENYLYFDPRSANARGTMPQPSALRAGTGGATAPGGLPGSALGAPMAGTGATFGQRRQGFSEAIVFMVGGGSMDEYGNLQEWAARTAGGDRAKRRVIYGASELINAGQFIKEELNKLGREIS

SEQ ID NO: 4972 - DNA, 597 bp, Myceliophthora thermophilia
atgaagctttattacgtcggcgttctcgacaactccaggaagccggcggtgcagctgtgcgccgcgtacgagctcagcgacttctcacgcttcaccagaaatgaatatggaaacttcatgaccatgatcagcaagacggtggccgagcggacagggccgggtcagagacagagcgtcgaggagcaggactacgttgtccactgctattcccgatccgaaggcgtcgcgggggtcataatcaccaaggactatccccacattgccgcccacagcgttctctccaagctcatggaccagttcctgtccgaggtcccgctcgacacggtcaaggccgcccgaaacgacggcgatgtctcgttccccgccgtgcaggatttcttgaacaactaccaggatgccaaccaagcgagcagcatcgccaggattcagcaggagctggatgagaccaagatcgtgttgcacaaggccatcgacagcgtcctgcaacgtggtgagaaattggacgacctcgtagccaagagctccgacctgagcgcgcagagcaagatgttctacaagtcggccaagaagcagaactcgtgctgccttgtgatgtga

SEQ ID NO: 4973 - protein, 198 aa, Myceliophthora thermophilia
MKLYYVGVLDNSRKPAVQLCAAYELSDFSRFTRNEYGNFMTMISKTVAERTGPGQRQSVEEQDYVVHCYSRSEGVAGVIITKDYPHIAAHSVLSKLMDQFLSEVPLDTVKAARNDGDVSFPAVQDFLNNYQDANQASSIARIQQELDETKIVLHKAIDSVLQRGEKLDDLVAKSSDLSAQSKMFYKSAKKQNSCCLVM

SEQ ID NO: 4974 - DNA, 843 bp, Myceliophthora thermophilia
atgaacaccaccttcaactcggcgctcaagcagcgcaccacgatccgcaaagacctctcggcgctctccggcggcgcctccgccgcctccccgaacgatgcccagcacgcgaaaccgcagctgaccccggccgcgctggggtcgctctcggcctcgctgacggccttcgcccggacgatcgacgagtacagcgcgctggccaagcaggagttgaacccggccaagcaggagaaggcgttcgagcgcatccgcgacttccgcgccgagctgtccgacttccgcgcccagttcgacgccctcaaggccgcccgcgacgacgccgcccacgccgagaacaggcgcgagctgctcggcaggcggccctacgccaccgccacccccgagaacccgtacgcggggacggcgacggcaaccacgtccgggtacgggctcgccgcgggtgccgccgggcgcgggcacgcgcggacgacgagcgtagccgaggccggcggcggcggcggcggaggaggaggaggaggaggagggttagggttggggatggggagcggcgatgtcacgcgggagagtcacgcgctgcgggagcagcagttctttgccaacacgcactccgcgctggacgagtacatcgcgcgcggccaggcggtgctgggcgacctgagccagcagagggagatgctcaagtcgacgcagcggaagctgtattcggttggcaacacgctcggcatctcgggggacacgatccggatgattgagcgccgggctaaagaggacaagtggatctttggggtgggcgtcgtcgtgtttttcctgttttgctggctggtgctgcattatttgaggtag

SEQ ID NO: 4975 - protein, 280 aa, Myceliophthora thermophilia
MNTTFNSALKQRTTIRKDLSALSGGASAASPNDAQHAKPQLTPAALGSLSASLTAFARTIDEYSALAKQELNPAKQEKAFERIRDFRAELSDFRAQFDALKAARDDAAHAENRRELLGRRPYATATPENPYAGTATATTSGYGLAAGAAGRGHARTTSVAEAGGGGGGGGGGGGGLGLGMGSGDVTRESHALREQQFFANTHSALDEYIARGQAVLGDLSQQREMLKSTQRKLYSVGNTLGISGDTIRMIERRAKEDKWIFGVGVVVFFLFCWLVLHYLR

SEQ ID NO: 4976 - DNA, 2124 bp, Myceliophthora thermophilia
atggcgcctgcccccgtgaaaggtgcaaaaaatcccgaagcggaatcgcaggacgacaagcccgtccccaagaaatcgctgttcgaggattcggattccagcggcagcgaggatgaccaggaggacggcggggccacgttaggcacctcggcggagctcaagatcaacgaggagtacgcccgccggttcgagcacaacaagaagcgggaggagttgcacaggcttcaggagaagtataaatcgagcggcctcggggacgaggagtccgaggagtcgtctgaggacgaaaccgaggatgatgatgccgaattgatcaccgaagagctggatgccgagatctcggccacgttacaggccatcaagaacaaggaccccaagatctacgacaagaatgccgtgttctacaagcccttcgacccggatgccctcccgaagaagaaggaggagaagccgatgtatctgcgtgactaccaccgcgagcggtatttgagcggcgatattggcgctgacgatgacaatggctccgctcccaacgccccccggacctacgcgcaggagcaagacgacatcaagaagtccatcatctctgagatcaatgccgccgctgccgctgccgacgaggaggaatggagtgacgacgacgccttcataaagcctgtcaagaaggacgaggcgccggcagaaaacggggtccatccgtctcggaaacccaacattactctcacggaggaggacgtcgccaacgcggacaagaacccggaggagttcctgaacaagttcatggcgtccagggcctgggttcccgaagatggtggctccaagtggcaagcattcgagtcggatgagggcgaggacaatggcgatctcgctgaagagttcgagcatgcctacaacatgcggttcgaggaccccgaaaagagcaacgagttcctgaagacgtactcgagaagcctggctgcggcccgctccgtgaggaaggaggaattgacgggcaggaagaagaagagagctctggagaaggaacggaaggaggcagagaagagagagcgtgaagccgagcgggcccggctgcggcgtctgaagatcgaagaggcgtcagagaaactcgccaagatcaagaaagccgctggcatgaggggccagaaactcacggacgaggagtggttgaagttcctggatgacgcgtgggatgacgacaagtgggaggaggagatgaagaagcggttcggcgatgattactacgccgaacccgacgacatgtctctgagcgaagaagaggaggacagcgaggatgaaggagggaagaagaaaaagaagaagaagaagccaaagaagcccaagtgggacgacgacatcgacatcaacgacatcgttcccgactttgaggactcggccaagcccgccatcaccctttccgacgaggacgccggcgcagcggagcaggaagaggacgacggggaggcgacgtccgacggagaggaggattcggacggggagcggccggccaagaagcgcaagacgagcaaagagatcaagaaggagcgcatccgggcgaagcgcgaggcccgcgccgagctcgccaagatcgaggccctcgtcgacaccaagatggagctcgagaacccgcgcgccctgcagtcgctcggcaagaaggccaccggcggtttccgctaccgcgagacctcgccgcagtccttcggcctcacggcgcgcgacatcctgctggcgccctcggacgccgccctcaacgagttcgcgggcctcaagaagctcgccaccttccgcgacgaggagaagaagcgcagggaccggaagaagctgggcaagaaggcccggctgcgcaagtggcggcgcgagacgttcggaaaggagtacgagcacaccgggcccacctttgggttcgaggcgctcctcgccaacgacaacacggacgccaagggcaaaggcaagggcaagggcaccggggcgaatgccgtcgctgccggctccggcgccgataagaagaagggcgctgcggagggcaagccagaaccggtcaatgggatcatcgagggggagaggaagaagaagaggaagaggtcgaagaagaagaagagcagcgctgctatggagctggacgaataa

SEQ ID NO: 4977 - protein, 707 aa, Myceliophthora thermophilia
MAPAPVKGAKNPEAESQDDKPVPKKSLFEDSDSSGSEDDQEDGGATLGTSAELKINEEYARRFEHNKKREELHRLQEKYKSSGLGDEESEESSEDETEDDDAELITEELDAEISATLQAIKNKDPKIYDKNAVFYKPFDPDALPKKKEEKPMYLRDYHRERYLSGDIGADDDNGSAPNAPRTYAQEQDDIKKSIISEINAAAAAADEEEWSDDDAFIKPVKKDEAPAENGVHPSRKPNITLTEEDVANADKNPEEFLNKFMASRAWVPEDGGSKWQAFESDEGEDNGDLAEEFEHAYNMRFEDPEKSNEFLKTYSRSLAAARSVRKEELTGRKKKRALEKERKEAEKREREAERARLRRLKIEEASEKLAKIKKAAGMRGQKLTDEEWLKFLDDAWDDDKWEEEMKKRFGDDYYAEPDDMSLSEEEEDSEDEGGKKKKKKKKPKKPKWDDDIDINDIVPDFEDSAKPAITLSDEDAGAAEQEEDDGEATSDGEEDSDGERPAKKRKTSKEIKKERIRAKREARAELAKIEALVDTKMELENPRALQSLGKKATGGFRYRETSPQSFGLTARDILLAPSDAALNEFAGLKKLATFRDEEKKRRDRKKLGKKARLRKWRRETFGKEYEHTGPTFGFEALLANDNTDAKGKGKGKGTGANAVAAGSGADKKKGAAEGKPEPVNGIIEGERKKKRKRSKKKKSSAAMELDE

SEQ ID NO: 4978 - DNA, 2115 bp, Myceliophthora thermophilia
atgggattcctcagtcaccgcagacgtcatatcgaggtccagccagaacagaaatgggactttatcagtctcaacgacttcaaatccacctctgtcttcacgccagtggcctacggttatctctggttttcactaatcatttcgctcgccgtctatgcagtcgatatattcaccgcctaccagcttcttgcctttaaccgttggtcttcacaaattgagcccgctcagtttatccccttcgacatctcgaaatggatctttaccgtttgtattctcctttccttcgcaaatctggcatacgagtatttccgcgccataaccattatgcgccgaggaagcgtcgccgaatgtttcctggacagtcttgctgcccgcctcgagagcattcggatgggagaaggccgaggttggaagagattcttggtctttgcggagctcaccaggagtaaaaagggcgccgaatacatcgccctgtttaccttcttcagctttcaatcttggattcgcgtccttctttgctctgggcctcgccaagccatcaacgcactcactctctactcggtttacgatgcgcggctccagatcaaccaatccagcttcgagacctcgctcgccgacttttttgacaagatcaaagctctggcaaccgaggagcctcgccaggccgtgatcctttccggcatgctgttcacgctcgtcatctgggtcttctccttcctctcattactcctggccgctctgtttttcgtctttttcctgtggagctacatcccgcgcgaggatggcggcttgactggcttctgtgagcgcaaagtcaacaagcgcctcaaacagatcgtctcaatcaagatcaacaaggccatggccgaggaagagcgaaagaggaaaaaggcggagctcaaggcagccaagaagaacggtggggacaggccggtgacgatgaagccatccctccccgttctcgacgacgacgatctcccccagatgccaaccttgaaccgtgccgataccttcgcttcgttcaccgagaagccttcccgtccaagcagccctggcagtttcgaaatgaactcacttggtcgaaggccgccaatgccaacgaggtcggaaaccaaacgcacaacagggagcgaatactctgccgagacctcgctccttggaagcgcagccgggatgggtatggctcctcccagatcctcgacacccaccttgcctccgctcgacctcgacgggtatccgcccgcgcgaacggcaaccacgtcgtccaacaggagctacgggcccgctccccatatgcagcggatggcttcgaatggttcgtcgctacgcgactatacagcaagccccgcaaatttcacgtcggagacgatgccatctgagccgcctcccgtcaagtcacccacgggatctttcaactacagcgggcctggtccgaatcagccccggttgccctatccaggcgacggcagaccaccccaacgcggcgatacccgttctccacatcccggagatagcaggttcccctatgccgagggcaacaggttgccacagcgccatgacactcggtcgacccatcctaacgacatgagattaccgtaccctggagacagcaacggagcggcctttgacaatcggttgaatggccgtgctagtcccgctccgtcaatgaacacttatcgcagcaatccgatgtcaccgcgcgggccggggccaggcgggcacccaatccgcagcgccacaaatcccatggccccacaaggccagcctcaattccctccttccagagcaatgacccaaccgatgcggcccttccaccaaccaactgatagccgcggctcgctgagaagcaatcagagctccagccgaccattccaacccttccagccgtatcaccagccgagcgctagcaacagctcgctgaggaatatgatcaatgctgtacagtacggtggggacaatggcagtgagtatggcggtactgcgagtcgaccgaaccagcagaccagaaacgacccctggggacatcgtggtgggtatggtgagagcaacggcaacggcaacggcaacgactcatggagccaggatcttgaaagaggcggcgggccgaggtattga

SEQ ID NO: 4979 - protein, 704 aa, Myceliophthora thermophilia
MGFLSHRRRHIEVQPEQKWDFISLNDFKSTSVFTPVAYGYLWFSLIISLAVYAVDIFTAYQLLAFNRWSSQIEPAQFIPFDISKWIFTVCILLSFANLAYEYFRAITIMRRGSVAECFLDSLAARLESIRMGEGRGWKRFLVFAELTRSKKGAEYIALFTFFSFQSWIRVLLCSGPRQAINALTLYSVYDARLQINQSSFETSLADFFDKIKALATEEPRQAVILSGMLFTLVIWVFSFLSLLLAALFFVFFLWSYIPREDGGLTGFCERKVNKRLKQIVSIKINKAMAEEERKRKKAELKAAKKNGGDRPVTMKPSLPVLDDDDLPQMPTLNRADTFASFTEKPSRPSSPGSFEMNSLGRRPPMPTRSETKRTTGSEYSAETSLLGSAAGMGMAPPRSSTPTLPPLDLDGYPPARTATTSSNRSYGPAPHMQRMASNGSSLRDYTASPANFTSETMPSEPPPVKSPTGSFNYSGPGPNQPRLPYPGDGRPPQRGDTRSPHPGDSRFPYAEGNRLPQRHDTRSTHPNDMRLPYPGDSNGAAFDNRLNGRASPAPSMNTYRSNPMSPRGPGPGGHPIRSATNPMAPQGQPQFPPSRAMTQPMRPFHQPTDSRGSLRSNQSSSRPFQPFQPYHQPSASNSSLRNMINAVQYGGDNGSEYGGTASRPNQQTRNDPWGHRGGYGESNGNGNGNDSWSQDLERGGGPRY

SEQ ID NO: 4980 - DNA, 294 bp, Myceliophthora thermophilia
atgtcggaagcctacgagcgcgagcgtcagaacaacgctcgcctggacgagctctcagccaaagtgtcggcgctgcggggcgtgaccatcgacatctacgactcggctcgctcccacgaggtgatcgactcgaccagcgagacgttttcttcgatggggagccagctcagaggctccgccagccgattaggccgcatggcggcggcggggaacaaggttgccatcttcaagctgtctaccatcatcattggaagcgtgctggtcctgtactatatctggaggctgctcttctag

SEQ ID NO: 4981 - protein, 97 aa, Myceliophthora thermophilia
MSEAYERERQNNARLDELSAKVSALRGVTIDIYDSARSHEVIDSTSETFSSMGSQLRGSASRLGRMAAAGNKVAIFKLSTIIIGSVLVLYYIWRLLF

SEQ ID NO: 4982 - DNA, 3102 bp, Myceliophthora thermophilia
atgacgccgaggcatgacccgttcagctgtcatcccgcagccccccgccaaaactgtccgccactgaccaacgacgccattcggccttcctgccagctctccgtttcccagaaccgcacaacctgcgcgtacgttaccaaaagtcaacgcaccaccctcggccatcccgttggtgttgttgacgctgcactgccctctcggtctcagcctccttcccgatacgcgctgcagcagcgtcccacggccgagttcaccatgtccgctcctcacgacggctacggccagtatccgccccagcagcccggcgagcagcccccgtaccctgacccagcctatgcgactcaggcggacgccccgccgccgcccgccagcacacatcacgctcccgagcacggcaagaaaaagaagcgcacatacgctgccggtgcattcgaggttggtaccggggccaatgcggtactagggggccaggcgcaagggggtggccagtttggagctcccgtcccgggatacggaggctacccacaaccagaagcctcttccgccgtttatggcgcccagccgactgcctacggcgcccagccgcaacagccgtatgggatgccccagccggcggcacccgtcgcgggctaccaggtcccggagccctactacccctctgctggagcccctccggccccaggcggcgttgccggtttgacggccggcatgtcggccatgaatctcggccctggagcgcagcagcagcagccgcagctcccgccgcaagcgagagccggacctctcaaccaactctacccgaccgatctgctcaaccaaccgttcaatgtctcagagctggacctccctccgccccccatcatcttacccccgaactctagcgttactccttcgcccgacgcgaattgcgcccccaagtatgtgcgatcgacactcaacgccatccccacgacgcactccctgctcaagaagagcaagcttccgctggcgcttgttatccagccctacgcgtccctccacgacctggatgaccctgttcccgttgtgcaagatcaggttatttcgcgttgccggaggtgcagatcctacatcaacccctttgtgacctttttggaccacggccaccgatggcgctgcaacatgtgtaacctcaccaacgatgtgcctcaggcattcgactgggacgctgcggcccagaagacggtggatcggtggcagcgacacgagctcaaccacgccgttgtcgagtttgtcgccccgcaggagtacatggtccgccccccgcaaccgctggtctatctgttcctgttcgacgtcagctatgccgccgtgtcgaccggtctcctggccaccagcgcccgcaccatcctcgacagccttaacaggatcccgaatgccgaccgccgcacccggctcggcttcattgccgtcgactcgagcttgcattacttctcggtgcccaaggacgccgacgagaacagcgagacgagcatgcttgtagtcagcgacctggacgagccgttccttcccgttccgcaagagctgctcattcccctgaccgagtgccggaacaacatcgagaacttcctcgccaagcttcccgacatgtttgccaacaaccagaacaatgggtcgtgcatgggctctgcccttagggctggccataagctcatctcccctctcggcggcaagatcgtcgtcctcagcgcatcactccccaacgtaggctacggcaagctcgacatgcgcgaggacaagaagctgctgggcacgtccaaggagagcagcctgctccagacggccaacagtttctacaagagcttcgcggtcgagtgctccaagaaccaggtctcggtagacatgttcctgttctcgtcccagtaccaggatgtcgcatcgctcagcaatctccccaggtacacgggcggccaaacctggttctacccgggatggaacgcgggccgcccagaggacgccatcaagttcgcatccgagttcagcgattatctctcatccgagatcggcctggaagcggttcttcgggttcgggcgaccacgggcctgcgcatgagcacattctacggcaacttcttcaacaggagctctgacctttgtgccttccctgccttcccgcgcgaccaatgctacgttgtcgaggtggccatcgacgagaacttgaccaagaacgtcgtttgcctgcagacggcggtgctgcacacgacgtgcaatggcgagcgccgcatccgtgtcttgacgctcgctctgccgaccaccagcaacctcgccgatgtctatgcttcggccgatcagtgtgccatcacaacctactacagccacaaggccgtagagagggcgctgagcaacggactcgactctgccagggatctgctgcagagcaagatcaccgagcttctacagaccttcagaaaggagcttgccggcggcagtatgggcggcggcttgcagttcccatccaacctccggggccttccggctctgttcctgggcttgatcaagcatgtcggtctcagaaaatcggcgcagattccgtcggacctcaggtccgccgccctctgcctgctttcgaccctccccctgcccctgctggtgcaatacatttacccccgcctctactcgctccacgacatgcctgacaacgcgggctaccccgatccggagacgagccaaatcgtgctccccccgccggtgaacctgtcatcggagagatttgtatcctacggcctctacctcatcgacgacggccagacacagttcttgtgggtcggccgcgacgctgttccgcagttgctcgtagacgtgtttggcgtgaccgaccgcgctcagctgcgggtcggaaagggttcggtgccggagctcgacaacgacttcaacgagcgtgtacgcgccgttatccagaagagccgcgaccataagtcgagaggggttggcagcgtcgtcgtgccgcatctctacattgtccgcgaggatggcgagcctagcctcaagctgtgggcccagacgctcttggtggaagaccgggcggatcaagggatgagtttccagcagtggatggggacgctgagggagaaggttagtatctga

SEQ ID NO: 4983 - protein, 1033 aa, Myceliophthora thermophilia
MTPRHDPFSCHPAAPRQNCPPLTNDAIRPSCQLSVSQNRTTCAYVTKSQRTTLGHPVGVVDAALPSRSQPPSRYALQQRPTAEFTMSAPHDGYGQYPPQQPGEQPPYPDPAYATQADAPPPPASTHHAPEHGKKKKRTYAAGAFEVGTGANAVLGGQAQGGGQFGAPVPGYGGYPQPEASSAVYGAQPTAYGAQPQQPYGMPQPAAPVAGYQVPEPYYPSAGAPPAPGGVAGLTAGMSAMNLGPGAQQQQPQLPPQARAGPLNQLYPTDLLNQPFNVSELDLPPPPIILPPNSSVTPSPDANCAPKYVRSTLNAIPTTHSLLKKSKLPLALVIQPYASLHDLDDPVPVVQDQVISRCRRCRSYINPFVTFLDHGHRWRCNMCNLTNDVPQAFDWDAAAQKTVDRWQRHELNHAVVEFVAPQEYMVRPPQPLVYLFLFDVSYAAVSTGLLATSARTILDSLNRIPNADRRTRLGFIAVDSSLHYFSVPKDADENSETSMLVVSDLDEPFLPVPQELLIPLTECRNNIENFLAKLPDMFANNQNNGSCMGSALRAGHKLISPLGGKIVVLSASLPNVGYGKLDMREDKKLLGTSKESSLLQTANSFYKSFAVECSKNQVSVDMFLFSSQYQDVASLSNLPRYTGGQTWFYPGWNAGRPEDAIKFASEFSDYLSSEIGLEAVLRVRATTGLRMSTFYGNFFNRSSDLCAFPAFPRDQCYVVEVAIDENLTKNVVCLQTAVLHTTCNGERRIRVLTLALPTTSNLADVYASADQCAITTYYSHKAVERALSNGLDSARDLLQSKITELLQTFRKELAGGSMGGGLQFPSNLRGLPALFLGLIKHVGLRKSAQIPSDLRSAALCLLSTLPLPLLVQYIYPRLYSLHDMPDNAGYPDPETSQIVLPPPVNLSSERFVSYGLYLIDDGQTQFLWVGRDAVPQLLVDVFGVTDRAQLRVGKGSVPELDNDFNERVRAVIQKSRDHKSRGVGSVVVPHLYIVREDGEPSLKLWAQTLLVEDRADQGMSFQQWMGTLREKVSI

SEQ ID NO: 4984 - DNA, 2277 bp, Myceliophthora thermophilia
atggcgcaggccgtaaaccgcattcgcggggcgtttgcgcccccgcgtaagggcgagacctttgagctgcgggcgggcttggtgtcgcaatacgcccacgagcggaaggaagcgattcagaagaccatcatggctatgactctggggaaggacgtgtcggcgctcttccctgatgtgcttaagaacatcgcgacgtcagacctggaccagaagaagctggtctatctgtatcttatgaactacgccaagacgcacccggacctctgcatcctcgccgtcaacaccttcgtacaagactcggaagaccccaatcccctcattcgtgcgctggcgattcgaactatgggctgcgtccgtgtggacaaaatggtggactacatggaggagcctctgcgtaagactctgcgggacgagtcgccgtacgtgcgcaagacggctgctatctgcgtggccaagctcttcgacctgaaccccaccatgtgcatcgagaacggtttcctcgagacattgcaggagatgatcggcgacccgaacccgatggtggtggccaactcggtacaagccctgtcggaaatcaacgaaacggcgcccgagacaaaggccctggtcgtcacaccagccaccctcaagaagctgctgatggccttgaacgagtgcaccgaatgggggagggtcacgatcctcaccaccctggccgcctaccccccgacagacgtcaaggagtcggagcacatctgcgagagagtcgcgccgcagttccaacacgtcaatcccagcgtcgtcctggctgccgtcaaggtcgtctttgcccacatgaagctcatcaaccctgagcttgtcaagcagtacctgaagaagatggcgcctccgttggtcaccctcgtctcttctgcgccagaggtgcagtacgtcgccctcaggaacatcgacctcctcctgcaggctaagccggacatcctcagcaaggagctcagggtgttcttctgcaagtacaacgacccgccttacgtcaaactccagaagctcgagatcatggtcaggatagcgaacgagaggaactttgaccagcttctgtccgagctgaaggagtatgccctcgaggttgatatggactttgtcaagcgcgccgtcaaggccatcggccaggtggccatcaagatcgaggcggctagcgagaagtgcgtgaatgctctattggacctgatcgcgaccaaggtcaactatgttgtccaagaggtcattgtagtcatcaaggacatccttcggaagtaccccggctacgagggcgtcattcccacactctgcaaatacatcgacgagctggacgatcccaacgctcggggtgctctgatctggatcgtgggcgagtatgccgagaagatcaacaatgccgacgccatattatcgggatttgttgacctcttcccggaggagtttactcaaacgcagctacaaattctcacggcggtggtgaaactgttcctcaagaagcccagcagcaaccagggcctcgtacaaaaagttctgcagctcgcgacggccgaaagcgacaaccccgacatccgcgaccgcgcctacatttactggcgccttctctccggtgacctggacatcgccaagaacatcatcctcgcccagaaaccgcccatcaccaccaccgtcaacagtcttcctccggtccttctcgaaaccctcctagcggagctctccaccctcgcgtcggtctaccacaagccgcccgagacgttcgtcgggaagggccggttcggcgcggaggcgattcagcgcgccgcgatccaggagcagcgccagaacgcggccgagaacccgatcgccgcgtcggtggccgccgcggccagcgcgggcggtgccggggccgcagcgccgcagagcaacatcgagaacctgctcgacatcgactttgacggggccgcccctgcgagcgcggagcagaatccggcggggacgggcacgcccgaccgggtggcgagtccggtgtcgaccggcggtttcggggccccgccgagcggggggatggcggacatcatgggcctgtttgatgcgcccgccccggggccagcagcaggcgcgggcgccgggggagcggctgctgctggcggcggcggtggtggtgccctgagcgacttgatgagcgggttcgagggcctcgatctgagcggggcgagtgcgccgccccctccaaggcagcagcttgggcacgggaacggcaatgcctcgggggggaagggcagcgatgacctgttgggcttgttttag

SEQ ID NO: 4985 - protein, 758 aa, Myceliophthora thermophilia
MAQAVNRIRGAFAPPRKGETFELRAGLVSQYAHERKEAIQKTIMAMTLGKDVSALFPDVLKNIATSDLDQKKLVYLYLMNYAKTHPDLCILAVNTFVQDSEDPNPLIRALAIRTMGCVRVDKMVDYMEEPLRKTLRDESPYVRKTAAICVAKLFDLNPTMCIENGFLETLQEMIGDPNPMVVANSVQALSEINETAPETKALVVTPATLKKLLMALNECTEWGRVTILTTLAAYPPTDVKESEHICERVAPQFQHVNPSVVLAAVKVVFAHMKLINPELVKQYLKKMAPPLVTLVSSAPEVQYVALRNIDLLLQAKPDILSKELRVFFCKYNDPPYVKLQKLEIMVRIANERNFDQLLSELKEYALEVDMDFVKRAVKAIGQVAIKIEAASEKCVNALLDLIATKVNYVVQEVIVVIKDILRKYPGYEGVIPTLCKYIDELDDPNARGALIWIVGEYAEKINNADAILSGFVDLFPEEFTQTQLQILTAVVKLFLKKPSSNQGLVQKVLQLATAESDNPDIRDRAYIYWRLLSGDLDIAKNIILAQKPPITTTVNSLPPVLLETLLAELSTLASVYHKPPETFVGKGRFGAEAIQRAAIQEQRQNAAENPIAASVAAAASAGGAGAAAPQSNIENLLDIDFDGAAPASAEQNPAGTGTPDRVASPVSTGGFGAPPSGGMADIMGLFDAPAPGPAAGAGAGGAAAAGGGGGGALSDLMSGFEGLDLSGASAPPPPRQQLGHGNGNASGGKGSDDLLGLF

SEQ ID NO: 4986 - DNA, 951 bp, Myceliophthora thermophilia
atggccgttgcgatcaacgaccgaacggcggaattccgtcacatcgtctctgccgctcagcggaaacaggcggccaagcctggctcgaagcgactgctcagcgatgcgcagaagagcgcggccgctgggggcgcgccaccgcggcggtccgaatttgcgcggcacgcggcagagatcggtaggggaatctcggcgacgatggggaaactcgaaaaactagcacaacttgccaagaagcgatcactctttgacgacaacccggtggaggtgaacgagttgaccttcatcatcaaacaagacctctctcgcctaaacgaagaaatccgcaacctgcaagctctgtcgaagcgcctgcatcctaaaccagatcaagagggggaaaacaacaagaacatcttgctcttgctgcaggggaagttgggggatgtcagcgcaaacttcaaagacgtgttggagatccgaaccaaaaacattcaggcttcaagatcacggaccgaggcgtttgtgtcgacggtggggcagcacgcccacgcatccataccaccctcggcatcccctctctatagcaccccggcgagggggacgccgtctcccggcgccgaccttatctcgctcaatccgatgggaggagaccagcagctgcagctgcaaatgatggaggaagggcagaactcgtacatccaacagcgcgggcaggccattgaggcgatcgaagcgaccatcaacgaactcggatcaatctttgggcagctcgccagcatggttagcgaacaatccgagatgatccaacgcatcgatgcaaacacagaagaggttgtcgacaacgtcgaaggagcgcaacgagagctgctcaaatactggtcccgcgtctcggggaaccgctggctcatagccaagatgtttggtgtccttatggtgttcttcctgctctgggtgttgatcgccgggtag

SEQ ID NO: 4987 - protein, 316 aa, Myceliophthora thermophilia
MAVAINDRTAEFRHIVSAAQRKQAAKPGSKRLLSDAQKSAAAGGAPPRRSEFARHAAEIGRGISATMGKLEKLAQLAKKRSLFDDNPVEVNELTFIIKQDLSRLNEEIRNLQALSKRLHPKPDQEGENNKNILLLLQGKLGDVSANFKDVLEIRTKNIQASRSRTEAFVSTVGQHAHASIPPSASPLYSTPARGTPSPGADLISLNPMGGDQQLQLQMMEEGQNSYIQQRGQAIEAIEATINELGSIFGQLASMVSEQSEMIQRIDANTEEVVDNVEGAQRELLKYWSRVSGNRWLIAKMFGVLMVFFLLWVLIAG

SEQ ID NO: 4988 - DNA, 564 bp, Myceliophthora thermophilia
atggcttctcgattcgcctcgtcctccctccatcagcgcgactcgcgcagcgacttgttcaaaggttacaccggcggttcggcaagcaggccagtcagcgccagcccgagccggcaactacaacagcagcaatactacggcggcaacgggtacggatatggcgggtaccagccaagcggctcgaccgggatcggcgcgagcgggagcagccatctgggcgtacccgggggcggaggctatcggccggccacgcctaatcgcaagggccaatatagcgacgccgtgctcaatgagctcgagagccagaacgatcagcaggtggagggcatcatgggcaaggtcaagctgctgaaggatatgacaatagcgattggcgatgagatccgcgactcgtcggccctggcggagaagatgaacgagggcttcgaccagacgcgactgcgggtgggcaggaccatgaacaggatgcttgtcatggcggaacggacgggcgtcggctggaaggcgtggctcgctttcttcgcggccgtcatcttcttgtttatctatgtctggctgttttga

SEQ ID NO: 4989 - protein, 187 aa, Myceliophthora thermophilia
MASRFASSSLHQRDSRSDLFKGYTGGSASRPVSASPSRQLQQQQYYGGNGYGYGGYQPSGSTGIGASGSSHLGVPGGGGYRPATPNRKGQYSDAVLNELESQNDQQVEGIMGKVKLLKDMTIAIGDEIRDSSALAEKMNEGFDQTRLRVGRTMNRMLVMAERTGVGWKAWLAFFAAVIFLFIYVWLF

SEQ ID NO: 4990 - DNA, 2994 bp, Myceliophthora thermophilia
atgtctatgttctcgaccatcacgaccgcgccggccaagcagtcggtgagcgagaccatccccgtgctcagcggccgcctgagcaccgcgaccctgctcgaagaccgccgtgccgccatcctcgggctgcgcagcttcgcgaaacagtatcccgcctcggtcgcctcgggtgccctgcgcagcctgatcggaagtctcagtcgcgatggcgaagacgtggacacggtcaaggtggcgctggagacgctgctgatgctgttcagcccggatccggacagcccagaagcctcggaggagattgccctatgggtagccgacgagtttactcagcggcacgagaacatcgccttgctgctgggcttcttgggtccggagaagaccgatttctactcgcggctctattcgctgcagctactgtcggccatcctgtctgcccggaccgagaggacggaggagtgcgtcgtcaacacgagcgacggcatcccccggctcgtggcggtgctcgaagatccgagggaggcagtccgcgacgaggccatcgggctgctcacggacctcacgcccacgtccaacgtgatccagaacctggtcaccctcgagaagggctttgcgcccatattcgacatcatcgccaaggaaggcggcctcgcaggtggcgcgagggtggtggaggattgtctcatcctgctggccaaccttctccggctgaacccgctgaaccaaaccatgttccgggacatgggccatgctgcggacatcagtcggctcttgaaggaagcctacaagggaggcggggacgaccaggaggtcgcgcagtgggtagaggtgcagcgtaacaggaatgtatacgccatgcttgccgtcatccggctgctcatcgtgcccggcgcagcggggacgtccctgaatcaggaagcgttggccggcgacctggtgtccggcgggcggacccgcgcgcggggaggcccggtcctagagagcactctccagattgccttttcccacgttgccgagctgccgatcaaagcagaagctctactagcctgcgctgacatgatcaggggcaatgctgacgtacagacgaggtttgccggcctccaagtgccgtcaccgctcgccgccccgatcgccaacggccacgcgcacgccgcccagatcaacggcgttcccaaggtctatatcatcgacggtctgttagacctggttctggccgtacactcgctgccggcgttcgacctgcgcatggccgcatgtacgtgcctgaaggcgtacttttacaagcacgccgagattcggatgcactttctcgaccacgcagtccggacgcacaaggcgcgtgctgacgatctgaccaacgccctgacgatcctcctccagcccgacccggagacggccgcggcggatccatacaggtactggttcgccgccgtcctcatgctccacctcttgcatgacaacccggagacgaaagcgctggcgatgagcgtcaccgagggcgacgaggccagtggcgaagaagtcgtcaccagtatccagaccatgacggcgcacctgctcagcagcgtcgccaagtcggaagacccgcgcatcagtatcggctacctgatgctgttgctgtgctggctgttcgaggacctcgacggggtgaacgacttcctgggagagtttaccaatcttcagggcctgatccaagcggcgatcgagaaccccaacggcgacgtcatggtccaggggctcagcgcgatgctggccggcgtcgtgtacgagttctcgacgaaggactcccccgtcccgcgcgaaaaggtcaaggagatgatcatgtcgcgcatgggccgcgaccgctacgtcgacaagctctccaggctccgctcccaccccttgatgcgcgatcacgaggtgataccgcagaagctcgagccggcgcccgaccagaagctgcccgacgtcttcttcgacgacacctttgtcgagttcttcaaggacaactacagccgcatcctgcgcgccatcgaccgcgacccggactcggagacgtccgtcatcaccaacggcgtgcagaagggcgtctcccgcaagctcgtcgactccctcagggccgaggtggcagacaagtcggcggcgctgcaagaagcccagacgcagacggcgtcgctggcggaagagctcgcccgggaacggacggcgcacgagcgggccaagacggccctctcggccgacctggccgcgctccgccagcaggtcgccgccaaggacgtggccctccagccggccgaggcgacgtcggcgcacctcgcccgccagctggcgcacgagcagcaggagcaccagcggacccgggccgaggtggcgcggctcaagacggtcaacgcggcgctccagcagggccacgcgcaggaggtggcggcgctgcaggcgcaggcgcgcgccaaggaggacgagggccgccggcaggccgaggcggccaggaaggcggccgagcaggaggcggagcgggtccggcggcgggccgaggcggagatggcggacctgcgggcgaccatcagccggctcgaggtggacctgatgaaggccaacaaggcgcgggccgcggaggaggagcgggccgccaagctggaggggtcggtgacggacaaggaggaggagctcggccgggcggaggggagggcgaaggaggccgagcggagggctggcgaagcggaggagagggccagcgaggccgagggcaggatcgaggaagcgcggtgcggggtcaaggaggccgaggagagggcgagaaaggccgaggcggaggtgaaggagctgaaggcaaggttgagcaagacggagaaggaggttgaggaggcgaagaaggaggtcaaggccaaggaggaggagcggaagggtgcgcagagcgagctggatgacatgctggaggtgtttggggacctggaggagaaggtgaccaagtacaaggtgagcggctatccctcctggcctgtgggcgcgggcgcgtga

SEQ ID NO: 4991 - protein, 997 aa, Myceliophthora thermophilia
MSMFSTITTAPAKQSVSETIPVLSGRLSTATLLEDRRAAILGLRSFAKQYPASVASGALRSLIGSLSRDGEDVDTVKVALETLLMLFSPDPDSPEASEEIALWVADEFTQRHENIALLLGFLGPEKTDFYSRLYSLQLLSAILSARTERTEECVVNTSDGIPRLVAVLEDPREAVRDEAIGLLTDLTPTSNVIQNLVTLEKGFAPIFDIIAKEGGLAGGARVVEDCLILLANLLRLNPLNQTMFRDMGHAADISRLLKEAYKGGGDDQEVAQWVEVQRNRNVYAMLAVIRLLIVPGAAGTSLNQEALAGDLVSGGRTRARGGPVLESTLQIAFSHVAELPIKAEALLACADMIRGNADVQTRFAGLQVPSPLAAPIANGHAHAAQINGVPKVYIIDGLLDLVLAVHSLPAFDLRMAACTCLKAYFYKHAEIRMHFLDHAVRTHKARADDLTNALTILLQPDPETAAADPYRYWFAAVLMLHLLHDNPETKALAMSVTEGDEASGEEVVTSIQTMTAHLLSSVAKSEDPRISIGYLMLLLCWLFEDLDGVNDFLGEFTNLQGLIQAAIENPNGDVMVQGLSAMLAGVVYEFSTKDSPVPREKVKEMIMSRMGRDRYVDKLSRLRSHPLMRDHEVIPQKLEPAPDQKLPDVFFDDTFVEFFKDNYSRILRAIDRDPDSETSVITNGVQKGVSRKLVDSLRAEVADKSAALQEAQTQTASLAEELARERTAHERAKTALSADLAALRQQVAAKDVALQPAEATSAHLARQLAHEQQEHQRTRAEVARLKTVNAALQQGHAQEVAALQAQARAKEDEGRRQAEAARKAAEQEAERVRRRAEAEMADLRATISRLEVDLMKANKARAAEEERAAKLEGSVTDKEEELGRAEGRAKEAERRAGEAEERASEAEGRIEEARCGVKEAEERARKAEAEVKELKARLSKTEKEVEEAKKEVKAKEEERKGAQSELDDMLEVFGDLEEKVTKYKVSGYPSWPVGAGA

SEQ ID NO: 4992 - DNA, 3774 bp, Myceliophthora thermophilia
atggttcggctgagagagatcccgaggacggcggcctttgcgtggtcgccgggcccgaatccaatcctggttactggcaccaggtccggcgctgtcgatgccgacttctcggacgagaccaagctggagctatgggacctcaacctcgacgacccaggtcagggcctggagctgcagccagtagccagcatcagcaccgagtccagattttacgacatagcatggggtgcccccagcgacgagcacccgcggggtgtcgttgccggcgcgatggaggacggctcgttgcagctgtgggacgccgccaagctccttgccggcgaggaagccctcatgtcgcgcgacaccaagcacaccgggcccatcaaggcgcttcagttcaacccggtgcgaccccaggtcctcgccactgccggtgtcaagggcgagctgttcatctgggatgtcaacgatacctcgaccgccttccgcctgggcaccgccgcagcccacgacatcgactgcgtggcctggaaccggagggtctccaacattttggcgacgggcagtgccggcggcttcgtcaccgtgtgggacctcaagaccaagaaggcgtcgttgacgctgaacaacaaccgcaagcccgtgagcgcgatcgcctgggaccccaacaactccacgaacctcctaaccgccacctccgacgacaataccccggtcatcctcctgtggaatctgaggaactcgcaggcgcccgaaaagacgctgcagggacacgaccagggcatcctgtcgctctcgtggtgccagcaggatcccggcttgttgctctcctgcggcaaggacaacaggaccctcgtctggaacccccagaccggagagcggtacggcgagttcccggaggccaccaactggaccttcctgacgcgcttcgaccccggcaacccgaacctggtggcgaccgcctcgtttgacggcaagatcaccatccagacgctgcaaaacacgaacccctccgccgtgccgacggcgcaggcgagcatggacgacgacgatttcttctccaaggctcccacccagctccagggggcttccttctcgctcccgagggcgcccgtctggttcgagcggccggtcggcgtctcgtttgggtatggtggcaagctcgtcaccttcaggaagaacgacacgcctgccagccaacccaggtcttccaagatccagatatcgagcttctcggtcgattccgacattggctcggccaccgagaagttcgaggaggcgtacaagaacggagacatcgcagccatctgcgactctcacgtggccgacgccaagacggaggaagagaaggccgactggcaggtgctgaagacgctgagcgagtccgacggacgcaccaagatcattgaatacctgggattcgccaaggatgaagaacctcccagcgccgcggctgccgactcggaggctaccgagacaaaggaagaaccgaaggagaccgggctggccccgccgcagaccaacggagaagacgggaagaagaagcacaagcgggtcacgagcatgtgggccgatgtcgacgacggcgatgatttcttgtccgacctcaccgccgccaagggcgccaagacggacaaccctttccagctcctgggcgaaggcggctcggccgaggatcaaatcaccaaggccgtcatcctcgggaacttcgagaaggcagtcgacctctgcctgaaggaggacagggttgccgacgccttcatcctcgcgaactgtggcggcaaggagctggtggacaaggtgcagaaaagctatctcgcccagaagaagggcagcccgagctatctccgcctcatcaactcggtgattggcaagaacctgtgggatgtcgtgtacaacgcggacctgagcaattggaaggagaccatggtcacgctctgcaccttcgccgatccctccgagttccccgacctctgcgaggcgctcggcgaccgcatcctcgaggtgggcccgaggaaggacgcttcgttctgctatctcgtcggctccaagctcgaaaaggtggtggatatctggatcgccgagctcgaggaagcggagcaggccgggctccaggaggccagcaacgactctaccttttcgatccatgccaggtcgctgcagcacttcatcgagaaggtcaccatcttccgccacgtcaccaagttcacagacaccgagaaggacctcagcgagggctggaagctcgcgtccttgtacgacaagtacacgcagtacgcggatatcgttgccggccacggccagttgtcggtcgcccagagatatctggacctgcttccgaccaactaccccgctgctgaggtggccaggaaccgcgtgaagctcgccactcaaaagtcggcttcccaaccggcgcagcgtcaaggtgctgccgctcccggcgcccgcgtatcctcccgcggcccgacgccggtgggctaccggcagcccgcatccatcccgccggctgcggcgagcaatcccaatccttatgcgccccctgctcctatccaacccgcctcggcaacgtcgtcgaacccgtacgcacccccgacggcgacgtctcagtatgcaccatccggcgcgtccccgtacgtgccagctgccggatttgctccttctcagccggtaggcgcagggtatggaccttcgggagcgtcggttcctccccctccgaggaacactggtcctccgcccaagatcaacaaggacgtgggcaactggaatgacgtgcccatggtcacgaagccccccgtccgcagaaccaccccgagcgtggcgcctatcacatctcccttcccgggccagaccagcccggccgggccttatcagcggagcgccccaacccctcctccgcctcctcccaaggggtccgcgccacctcgcaacgtgacgtctcctcctcctcctcctcctccctctgggccgccgcgatcggggtcggtgacgtcgtccaatgcttcgaacccgtacgcgcctccgccaccggcggcaaccggcttggcttctccgatggcgcccccgcccgccccgaggacggcatccccttataaccctcctcctgcaggccctccgccgtccaacaggtacgcgccggctccggcgccttcggcccaaccatacaatcaaggtcccggatctaccccgctagcacctcctccggcaaacctttacgccccgccgccaactttccaagccgcgcctcctcctcctccttcttctcatccttcttctcagcagccgtcctcagtaccgccgccaccccagggatctcgaccacctgtgggtccgccgccgagggctggtcctccccccgcggcgggcggccctccccccgcggcccaggcaccggcgtcccaaagccccacgtcgcccaaggcgtcggcaccttcacaaacgaaccggcacccccctggcgaccgctcccacatcccacccaatgcccagcgcatggtggagctcctgagccaggacatgcagcgtgtggcgtccaaagcgcccgcggcgtttgcgccgcaggtcaaggatacgcagaagcggctgaacctgctgtttgaccacctcaacaacgaggagctggtacgtccggataccatcgagcagctgacgacgattgcggaggccatcacggggaagaactatgaattggcgtcgaagctgcagacggagattcttcgggacaagatggaggagtgcgggcagtggatggttggtctcaagaggctgattagcatgagcaaggctacgccttaa

SEQ ID NO: 4993 - protein, 1257 aa, Myceliophthora thermophilia
MVRLREIPRTAAFAWSPGPNPILVTGTRSGAVDADFSDETKLELWDLNLDDPGQGLELQPVASISTESRFYDIAWGAPSDEHPRGVVAGAMEDGSLQLWDAAKLLAGEEALMSRDTKHTGPIKALQFNPVRPQVLATAGVKGELFIWDVNDTSTAFRLGTAAAHDIDCVAWNRRVSNILATGSAGGFVTVWDLKTKKASLTLNNNRKPVSAIAWDPNNSTNLLTATSDDNTPVILLWNLRNSQAPEKTLQGHDQGILSLSWCQQDPGLLLSCGKDNRTLVWNPQTGERYGEFPEATNWTFLTRFDPGNPNLVATASFDGKITIQTLQNTNPSAVPTAQASMDDDDFFSKAPTQLQGASFSLPRAPVWFERPVGVSFGYGGKLVTFRKNDTPASQPRSSKIQISSFSVDSDIGSATEKFEEAYKNGDIAAICDSHVADAKTEEEKADWQVLKTLSESDGRTKIIEYLGFAKDEEPPSAAAADSEATETKEEPKETGLAPPQTNGEDGKKKHKRVTSMWADVDDGDDFLSDLTAAKGAKTDNPFQLLGEGGSAEDQITKAVILGNFEKAVDLCLKEDRVADAFILANCGGKELVDKVQKSYLAQKKGSPSYLRLINSVIGKNLWDVVYNADLSNWKETMVTLCTFADPSEFPDLCEALGDRILEVGPRKDASFCYLVGSKLEKVVDIWIAELEEAEQAGLQEASNDSTFSIHARSLQHFIEKVTIFRHVTKFTDTEKDLSEGWKLASLYDKYTQYADIVAGHGQLSVAQRYLDLLPTNYPAAEVARNRVKLATQKSASQPAQRQGAAAPGARVSSRGPTPVGYRQPASIPPAAASNPNPYAPPAPIQPASATSSNPYAPPTATSQYAPSGASPYVPAAGFAPSQPVGAGYGPSGASVPPPPRNTGPPPKINKDVGNWNDVPMVTKPPVRRTTPSVAPITSPFPGQTSPAGPYQRSAPTPPPPPPKGSAPPRNVTSPPPPPPPSGPPRSGSVTSSNASNPYAPPPPAATGLASPMAPPPAPRTASPYNPPPAGPPPSNRYAPAPAPSAQPYNQGPGSTPLAPPPANLYAPPPTFQAAPPPPPSSHPSSQQPSSVPPPPQGSRPPVGPPPRAGPPPAAGGPPPAAQAPASQSPTSPKASAPSQTNRHPPGDRSHIPPNAQRMVELLSQDMQRVASKAPAAFAPQVKDTQKRLNLLFDHLNNEELVRPDTIEQLTTIAEAITGKNYELASKLQTEILRDKMEECGQWMVGLKRLISMSKATP

SEQ ID NO: 4994 - DNA, 3489 bp, Myceliophthora thermophilia
atgcggagctccgctcaagcttccgacggctgcgggcaacggaacggaaccgggctgcgcccgccaggcacccgacacggccatcgcaacttcacatttgccgggcactctgcggcaatctttcaaaccgcccccgatgcgccggtgattgcgcccagcgcacgaactgacgagctggcaggcgccatgctctccgcattcacagctcgacccatcatcgagctcaagcaacgagacaagtccaagatcgagtccattctcgcctacggtgaccgcgtactcgttggtctaaataccggctccttacgtatctaccgggtcaacgacccctcgacacctcctccgaccgattcccagccttccgagaacccatcggcctctcaggctgctcccgaggactccggccgcgccacaactacaacggccgcacaagatggccagccagcgcccaagcccgccgcagccaagcccaccgaccttctccgtgaggtggagagattctcgacacgcgccatcgaacagctagccataatcaaagaggctaacacacttgtgtcgctctccaactatgccgtctccctacacgaccttcagactttggagccaatcgaggctccgctggcccggaccaagaatgcctccgcctttgccgtgacgagcaacatcatcaaggaccccgccacgggaatcccagagatcatctcgcggctggccgtttccgtcaagcggcgtctcctgctttggtcatggcacgagagtgagctgtcccccgacgtcaccgagatcgtgctccccgagtcgatccggtccatcacttgggccaatgccacgaggctcgtctgcggcatgaacagcggatatgccatggccgacgtcgagactggcaacgtagaagacattgttgggccgggcgccatcggcggtgccgcaggcgggcagggccgcttcggtgctgtcagcgctgccggcatggggtacatgggcctgggtggttatatgccgaagcccctgtcggccaaactcgcaaatggagagctgctgctcgccaaggatatcaacaccttgtttattgacgactcgggaaaggccctcgagaagcggcagatcccctggcaggccgcaccagactcgattgggtacagctacccatacatcttggctcttcaaccgccggcgaagggaagcctagagatccgaaacccgaacacactcacgcttttgcagagcattgccctccccggcgccgcagcgctccattttccacctccaacagtcagcctggcgcacgccggcaagggatttcatgtctcgagtgacagggttgtgtggaaaatggacgctaccgactatgatacccaagtcgaagagctcgtcagaagtggcaaactcgacgaggcaatcagcgtcctcgacatgctagaggatgcattgctcaagaacaagagagacaccttgcgggaggtcaagatgcaaaaggccgagctgttgttccgccaaaagaagtaccgcgactcgatggacctgttcaatgaggacgaagtcgatgctccgccagagagagttttgaagctgttccccaagattatcgcaggcgatctatccggggccgaggaagagaagcacgacgaatccgagcaggagagcgcgaacgggaagacgagcagcgagcaggaagcaaagcccgatgccgcggaaattgcgtcgccatcgagagctggcgggtttgccaagtacctcatggggagtcgaaagctcaacccggagaccgcatccatcgcctcgtcgaagaagggctccgacgatgacacagccagcatcaagggaaagccgcaggacgaccagtcccaggcggagaaggaccttatggcctcggttctggccctcaatagctatctcgccggcgctcgcacccggctccagcgcgtcattgacccgaccaccggcaagctcaaaccccgtaaatcccagtccggctcgaccgaagaggccttcaagactctcctcctctcttccccggacgagggcgacgagcagctcgagcgtgccctgcagtcgaccttccggatcattgacaccgccctcttccgcgcctacatgtactcgcgccccacgctggtcagctcgctcttccgcatccccaacttctgtgacccggacgtggtcaacgagcgcctgctcgagcacaaccgcttcaacgagctcgttgacttcttttacggcaagaagctccacagccaggcgctttccttgctccgtcgattcggcagccccgacgagcccgacgaggccgcgcccggcttgcacggcccgcggaggaccgtcatgtacctgcagggtctgccgccagagatgatcgacgtgattctcgagtattcggagtggacgctccggaaagacccagagctgggcatggaggtgttccttgcggactcggagaacgccgagacgctcccgagggacagggtcgccgcgttcctaggcggcatcgatccgaagctggagatccagtacctcgagcatattattaacgacctaaacgaccggacgccgaactttcacgatcgactggtcgagctgttcatcaagcagctggtaggcaaggaggagagaggggaggagcgggacgctctcatggaacgattagttagcttcttgaaggagagcgagcagtacggtttgggcaaggcgagagctctgattcctaaagacgaccccccgttttacgaagcgcaagccgtggtactcagcaagatgggccagcacagacaagcacttatgatctacgtctttaagatgcaagactatgctaaagccgaagaatactgcaatcgcattcacaaaactcagcaacctccccagcagactgcgacggctgaccgccacaatgtcactcaagatcctagaaccaatcagcccgcgaccgccgaggaacagccttccatctaccacactctcctctccctctacctcaaacccccgccagaatacagccctaacctggcgcccgctctcgacctcctctcaaaacacggctcgcgcctgccggcgacgtccactctctccctcgtgcccgagaccctccctgtggcacagctcgagtcctacttccgcggccgcatgcgcagcgccaacagcgcggtcaacgaggcgcgcgtcgtggccggcctgaggaagacggcgctctttgcgagccagtctctcctgtatctgggggatgggatacccggcgggcagggcgggcggaaccggcgggtggtgattggggaggagagggtctgcggggtctgtcacaagcggatcggcgggagcgtggtggctgccatgccggataacgcagtcgtgcattatgggtgtttggggaggtctgcggccgccacggcgagtcccggcgtcaacggggtcagacacgggtcgtccagggccatgtcgcctgctggggagagtgtgaggtccggatacgggcaatggggtggccgggtgagtggttga

SEQ ID NO: 4995 - protein, 1162 aa, Myceliophthora thermophilia
MRSSAQASDGCGQRNGTGLRPPGTRHGHRNFTFAGHSAAIFQTAPDAPVIAPSARTDELAGAMLSAFTARPIIELKQRDKSKIESILAYGDRVLVGLNTGSLRIYRVNDPSTPPPTDSQPSENPSASQAAPEDSGRATTTTAAQDGQPAPKPAAAKPTDLLREVERFSTRAIEQLAIIKEANTLVSLSNYAVSLHDLQTLEPIEAPLARTKNASAFAVTSNIIKDPATGIPEIISRLAVSVKRRLLLWSWHESELSPDVTEIVLPESIRSITWANATRLVCGMNSGYAMADVETGNVEDIVGPGAIGGAAGGQGRFGAVSAAGMGYMGLGGYMPKPLSAKLANGELLLAKDINTLFIDDSGKALEKRQIPWQAAPDSIGYSYPYILALQPPAKGSLEIRNPNTLTLLQSIALPGAAALHFPPPTVSLAHAGKGFHVSSDRVVWKMDATDYDTQVEELVRSGKLDEAISVLDMLEDALLKNKRDTLREVKMQKAELLFRQKKYRDSMDLFNEDEVDAPPERVLKLFPKIIAGDLSGAEEEKHDESEQESANGKTSSEQEAKPDAAEIASPSRAGGFAKYLMGSRKLNPETASIASSKKGSDDDTASIKGKPQDDQSQAEKDLMASVLALNSYLAGARTRLQRVIDPTTGKLKPRKSQSGSTEEAFKTLLLSSPDEGDEQLERALQSTFRIIDTALFRAYMYSRPTLVSSLFRIPNFCDPDVVNERLLEHNRFNELVDFFYGKKLHSQALSLLRRFGSPDEPDEAAPGLHGPRRTVMYLQGLPPEMIDVILEYSEWTLRKDPELGMEVFLADSENAETLPRDRVAAFLGGIDPKLEIQYLEHIINDLNDRTPNFHDRLVELFIKQLVGKEERGEERDALMERLVSFLKESEQYGLGKARALIPKDDPPFYEAQAVVLSKMGQHRQALMIYVFKMQDYAKAEEYCNRIHKTQQPPQQTATADRHNVTQDPRTNQPATAEEQPSIYHTLLSLYLKPPPEYSPNLAPALDLLSKHGSRLPATSTLSLVPETLPVAQLESYFRGRMRSANSAVNEARVVAGLRKTALFASQSLLYLGDGIPGGQGGRNRRVVIGEERVCGVCHKRIGGSVVAAMPDNAVVHYGCLGRSAAATASPGVNGVRHGSSRAMSPAGESVRSGYGQWGGRVSG

SEQ ID NO: 4996 - DNA, 966 bp, Myceliophthora thermophilia
atgtcgaaccccaacgcgctcctcctgctcgccgaccacatcaaactgtcgctcctcgagcagaagcgcgcaaaggcgctcaatctccggcgggactcgcaagacgggcacatctctcgctcgctcgaccacttcagggagggcttggaatcgctcgagaaagagcaatggcgacttgaagaagcaggcgatgaatccaaagcgtcctccctccgagataccctctcttcgctgcgcaagcaatacgacgatctctcctcccagttcagcggcaacgcttccgccacatcctccgccaccctaacccaccccaacgacccctcgctagcagccgactttgcccacgcccaatcggcccacgccgaacacccaccagcactagcttcagcatcagctattcctgaatcatcatcgtcaccaccaccgccgcaagcaggcgccaccaccaccatcaccaccacctacaacaaccaccccgctcccgccaagaaggcggtccgcttctcctcccccgcgacggacctcgagtcccaaaccaccacccgcccgggcatcggcaccgccaacaacccgctcttcccctaccgcgacgagccagacgacgacgacgacgacacggccgggtacgcggcgcacatcgcggcgcaggggctgtccaacgcgcagatccacgcgtaccaccagcagatcctgtcggagcaggacgcgcagctggagacgctgagcgcctccatcgcgcggcagcgccagctgtcgatgcagatcggcgacgagctcgaggaccaggtcctgctgctggacgagagcgagcgcgccgccgagcgccaggccggcgccctcggccgcgcccgccgccaggtcggccgcatcgctaggaacgccgccgagagcggcgagggcaggcagctcaccgccatcgtcgtcctcatcatcgtcttggtcttgttgattatcattctcaaatga

SEQ ID NO: 4997 - protein, 321 aa, Myceliophthora thermophilia
MSNPNALLLLADHIKLSLLEQKRAKALNLRRDSQDGHISRSLDHFREGLESLEKEQWRLEEAGDESKASSLRDTLSSLRKQYDDLSSQFSGNASATSSATLTHPNDPSLAADFAHAQSAHAEHPPALASASAIPESSSSPPPPQAGATTTITTTYNNHPAPAKKAVRFSSPATDLESQTTTRPGIGTANNPLFPYRDEPDDDDDDTAGYAAHIAAQGLSNAQIHAYHQQILSEQDAQLETLSASIARQRQLSMQIGDELEDQVLLLDESERAAERQAGALGRARRQVGRIARNAAESGEGRQLTAIVVLIIVLVLLIIILK

SEQ ID NO: 4998 - DNA, 846 bp, Myceliophthora thermophilia
atgtcgttcgatcagctctcgtcgctcgaggcggggcgccgccggggcgctcctggatacagcgacgaccccgagttccagcggctgtcgcaggacctgatgaacaagctgttcaagctcaacggcaacaaccagcgactgagcgcagaggtcggctatctggggacacggcgcgatacgccacgggtgcgagagcgggtgcatgagctgatcgaggaatcgcgcgacaccttcaaggaggtgggcgagggcgtcaagaagatccagacatgggaggatgtcacaccaacgcaaaagtacatgcaacaaaagctctcgcgcgagttccagtcctccctttccgagttccaatccctccaacggcaggctctcgagaaggaaaaggcttccgtctcggccgcccgcgcggcagtcgaacaagaggccgcagcgggcggtggcgccggcgccggcatcggcggtccggggagcccgcagctcctccaggaacagcagcagcagcagcagcagcagcaggagctcgcgcggctggcgccgcaggacgaggtcgacttccaggaggcgctcatcatcgagcgcgaggaggagatccgcaacatcgaacagggcgtgggcgacctcaacgtgctgttccagcaggtcgcccagatcgtgaccgagcagggcgaggtgctcgacacgatcgccaacaacgtcgagaacgtgcgggacaacacgcgcggcgccgaccgcgagctccggagcgccgccaggtaccagaagaacgcccggagcagggcgtgctgcttgctcatcatcttgaccgtcatcctgaccatcatcctgttggcggtgtttttgggctga

SEQ ID NO: 4999 - protein, 281 aa, Myceliophthora thermophilia
MSFDQLSSLEAGRRRGAPGYSDDPEFQRLSQDLMNKLFKLNGNNQRLSAEVGYLGTRRDTPRVRERVHELIEESRDTFKEVGEGVKKIQTWEDVTPTQKYMQQKLSREFQSSLSEFQSLQRQALEKEKASVSAARAAVEQEAAAGGGAGAGIGGPGSPQLLQEQQQQQQQQQELARLAPQDEVDFQEALIIEREEEIRNIEQGVGDLNVLFQQVAQIVTEQGEVLDTIANNVENVRDNTRGADRELRSAARYQKNARSRACCLLIILTVILTIILLAVFLG

SEQ ID NO: 5000 - DNA, 2859 bp, Myceliophthora thermophilia
atgttgtctaacccgcttcaccggttttcaccttatcacatcccctcaactacgctgctgtcgaacggccatgttccgggcggccaccttcacgcggccggacttgactcgctcgcccctggctctcactacgctctccagcaactccagcagcatgtcggcgtccacaccccccacctcgctcggactggccctcaaccgaagcataggcaacatccttatgggcctgccgccagatcttcgggggcagctggaccgattcggaggaggatcagcagggcctgcgatcagtgcaaccagctaaggaccaaatgcgacggccaacatccatgcgctcattgcattgagttccaactgggctgcgagtacatccgagagcgcaagaagcgtggcaaggcatccaggaaagaccttgcacagcaagccgccgcccaagccgctgcccaagcagctcagaacggccagaagaccgagaattcaacgacggagaatacaaagcccgcggagaaccggaacgatacaccgagcaacaccaagcctgtcttgacggttaacaccgaccagccaccagcgttggacaagaacgtgaccgatgtaccagaggatcctaatctgagggagcagaggacagggagcatcgaggccttgggcgacatgagcgcccatccggcacccatgtcggctcaccccggggcgattgagcgagaacacctcgacaacccgacagcactggaccttaacggatatggttccgttcactcagcgtatgaccgccaaatgggcgcacacatgatgaacggcccacctcatgcgccctacggcccaaaccagggcaacatgtccagttacccagagctcccatatgctctgcaaacgcagagcccgacgggttatcccgcaaatgccgcgaatgggttccgcctcgccaacagccctctcggcccctattcgatgggtggagaggccccatcgccgggcggatggatgaacatgtcatcgccgcccccccagtttgcttcgcatatgccgcagaacgggtataaccgttcgcagctccggtacccagtcctggagccccttgttccccatctgggcaacatcatccctctgtcgctcgcgtgcgacctcatcgacctctacttcgcgagctcatcctcggcccagatgcacccaatgtcgccttatgtcctcggattcgtcttccggaagcggtcgttcctccacccgaccaagccgcgacagtgccagccggctctcctggccagcatgctatgggttgctgcacagacaagcgacgctcctttcctgacgagtgtcccttcggcccgtggcaagatttgccagaagctcctggagttgacggtcagccttctcaagccgctcatccacacgccctcggaggaggcatcgcctgtctcgagccccatcgtggatggcgttgccctcggcggccttggcgtcgcactgcccgggtccatcagcatggatgccctcaccagcgagtcgggcgctttcggcgcggccggttctctggacgacgtggtcacctacatccaccttgcgacggtcgtgtcggcgagcgagtacaagggagccagtctgcgttggtggaatgccgcgtggtcgcttgctcgcgagctcaagctcgggcgcgagttgcctcagaacgcgccggcgagtcgccagggtggagccgccgaaatggaaggcgagggcaatggtgccgagatgaccattcccggcgtgatcacggaagaggaacgcgaggagaggcggcggatctggtggctcgtctacattgtcgaccgccatctcgccctctgctacaaccgcccgctcttcctgctcgacatcgagtgcgaacacctctaccagcccatggatgataccgattaccagaacggtaacttccgtgcctacacaaccgacccgaacgttctcggttcggataccgagggaaaacgcacccgggtcaagggcccctcgttcgtgtgcagcggccacagcatctttggctacttcctcccactaatgaccatcctcggcgaaatcgtagatcttacgcacgccaaaaaccaccctcgcttcggcgtcgggttccgttcgtctcgcgagtgggatgaccaaacggccgagatcacccgccaccttgacatgtacgagcagagcctgaaggagtttgagaagcgacacctcagcatcaacgcgcaagcccaggcagcagacgagaaggcggccgaggcggccggcgtccctacggctaatgctaacgacctcccgggcaccccttcgggtcacagcgtgcacagcgtgcacaccacgtcgagccgcatgacggagagcgacatccagacccgcatcgtcgtggcctacggcactcatgtcatgcacgtgcttcacatcctcctcaccggcaagtgggatcccatcaacctcctcgacgacaacgacctctggatcagcagccaggggttcatcacggcgaccggccacgcggtcagcgcagccgaggccatcagcaacattctcgagtacgaccccgggctcgagttcatgcccttcttcttcggcatctacctcctccagggctcgttcctgctgctgctcattgccgacaagctgcagctcgaggcgtcgccgagcgtggtgaaggcctgcgagaccatcatccgcgcgcatgaggcgtgtgtggtgacgctcaataccgagtatcagcgcaactttagccgagtcatgcgcagtgctctcgctcaggtacggggccgcgtgcccgaggaccttggcgagcagcaccagcgtaggagggaactcctcgcgctatacaggtggacgggcgatggtaccggtctggcgctgtag

SEQ ID NO: 5001 - protein, 952 aa, Myceliophthora thermophilia
MLSNPLHRFSPYHIPSTTLLSNGHVPGGHLHAAGLDSLAPGSHYALQQLQQHVGVHTPHLARTGPQPKHRQHPYGPAARSSGAAGPIRRRISRACDQCNQLRTKCDGQHPCAHCIEFQLGCEYIRERKKRGKASRKDLAQQAAAQAAAQAAQNGQKTENSTTENTKPAENRNDTPSNTKPVLTVNTDQPPALDKNVTDVPEDPNLREQRTGSIEALGDMSAHPAPMSAHPGAIEREHLDNPTALDLNGYGSVHSAYDRQMGAHMMNGPPHAPYGPNQGNMSSYPELPYALQTQSPTGYPANAANGFRLANSPLGPYSMGGEAPSPGGWMNMSSPPPQFASHMPQNGYNRSQLRYPVLEPLVPHLGNIIPLSLACDLIDLYFASSSSAQMHPMSPYVLGFVFRKRSFLHPTKPRQCQPALLASMLWVAAQTSDAPFLTSVPSARGKICQKLLELTVSLLKPLIHTPSEEASPVSSPIVDGVALGGLGVALPGSISMDALTSESGAFGAAGSLDDVVTYIHLATVVSASEYKGASLRWWNAAWSLARELKLGRELPQNAPASRQGGAAEMEGEGNGAEMTIPGVITEEEREERRRIWWLVYIVDRHLALCYNRPLFLLDIECEHLYQPMDDTDYQNGNFRAYTTDPNVLGSDTEGKRTRVKGPSFVCSGHSIFGYFLPLMTILGEIVDLTHAKNHPRFGVGFRSSREWDDQTAEITRHLDMYEQSLKEFEKRHLSINAQAQAADEKAAEAAGVPTANANDLPGTPSGHSVHSVHTTSSRMTESDIQTRIVVAYGTHVMHVLHILLTGKWDPINLLDDNDLWISSQGFITATGHAVSAAEAISNILEYDPGLEFMPFFFGIYLLQGSFLLLLIADKLQLEASPSVVKACETIIRAHEACVVTLNTEYQRNFSRVMRSALAQVRGRVPEDLGEQHQRRRELLALYRWTGDGTGLAL

SEQ ID NO: 5002 - DNA, 963 bp, Myceliophthora thermophilia
atggcttctccaaacccgaacaagtctgacgagacctcgtacgttcaaatgtccgccgccgcagtcgacagccgcggcaccgacgcgagcctggtaggctcccactgccagtacagctactgcaaccagctcgacttcctcccgttccgatgccagagctgcaacaagacgttctgcctcgagcaccgcaccgaagacagccacgaatgcacgaacccgggggcgtgggcggcgcgccggcgcgagcaggaactggctaggccgtcgctgggccagggcaagcccatgcgcgacccggtgggccggaagaaggtgtgcgccgacgacagctgcagcgccgtcatcggcacgccgctcgcgccgggcgtgccctgccccggctgcaaccgcgactactgcctcaagcaccggctgcgcgaggagcacgactgcagcagcaagacgccgatcggggcccgcgccgccggcgcggcccaggccgccgccgtcgccgagggggccaggagcgcgctggagcgcttccgcctgtggggccaggccaagaagcagcaggccaagatgtctctcgcgtcgacgagctcgaagcccaaggtcgcgcagatggtcgcggtcaacaatctcaagaagacggccaagggggacgccaagattgcgcccgagaagaggatatacctgtacgttgaggccgaggcggtgaccgccagggccaagattccgaagggcgagttcttctactcgcaggattgggtggttggcaagatgctggatgctgcggcgcggagtttgcaggtgccgaatgtcaacaaccagtcgagctcggaggaggacaagttacgggtgttccatgtcgaaggagggcggttgctagacttcaacgagaagttgggcgacgtgttgcagagcggcaacaccgttgtcttgttgaggggtgttgggccgccgccggatctgatcgaggcatga

SEQ ID NO: 5003 - protein, 320 aa, Myceliophthora thermophilia
MASPNPNKSDETSYVQMSAAAVDSRGTDASLVGSHCQYSYCNQLDFLPFRCQSCNKTFCLEHRTEDSHECTNPGAWAARRREQELARPSLGQGKPMRDPVGRKKVCADDSCSAVIGTPLAPGVPCPGCNRDYCLKHRLREEHDCSSKTPIGARAAGAAQAAAVAEGARSALERFRLWGQAKKQQAKMSLASTSSKPKVAQMVAVNNLKKTAKGDAKIAPEKRIYLYVEAEAVTARAKIPKGEFFYSQDWVVGKMLDAAARSLQVPNVNNQSSSEEDKLRVFHVEGGRLLDFNEKLGDVLQSGNTVVLLRGVGPPPDLIEA

SEQ ID NO: 5004 - DNA, 372 bp, Myceliophthora thermophilia
atggtaccactgagcatcgcagaggccctaccggtcgatccggctcttgccacggtcggcggttgcgcctctcctgtcctgcgcccggtgcctgtccgtggagtcatgcctcagccggcgatgaactctccggccgctgtatcggccgttcgggttctccggaagaatgtttcttgccctgcctgcggcaaaactggcctacgcgcgacgtccctgaagcgccaccttcggacgcactccggggaccggccgtacaagtgtgacctgtgccacaacaccttcactcgcagcgacacccgcaactggcactttcagaggtgctccgtccgccacggcaacccgactggtgcgagccacgcgcctcacccctaa

SEQ ID NO: 5005 - protein, 123 aa, Myceliophthora thermophilia
MVPLSIAEALPVDPALATVGGCASPVLRPVPVRGVMPQPAMNSPAAVSAVRVLRKNVSCPACGKTGLRATSLKRHLRTHSGDRPYKCDLCHNTFTRSDTRNWHFQRCSVRHGNPTGASHAPHP

SEQ ID NO: 5006 - DNA, 2109 bp, Myceliophthora thermophilia
atgccgtcccggtcttggacccagtggtttaattccaaagcggaccccgaagcagcggagcctgctgggacccattgtaataagaactcgacccgtaaccatacgtcgcctacccacagcgattcgccttcccctctcgaccactcgccgcgctcgccctctccaacgcctcaaccggccactccttgcttggctgtgcttggccacactgttacatctcagcaggttgcctttgcgggcccggcccagaaatatccaccgcgtgcttcgtctcccgccattgccggcggccaggacgatttcgactactcttacaccaccggtcgcatcaccaacatcgctgacgctgccgataccgatctcgccctcgacatcgacaccaaagacgtagacatgacgaccggccccgatttcggctcggccactggccgcagccgtcaggactcattcgtcagcgccggtgcgaagcccatctccatgaccaatccgaatcgcgaacacgcaaatcgcgctcgccgcgagagtctagctgggagcctgatgggaggcatgagttggggcggtatctcagtcggcagtttcatccgtgaagacccttccgaccgtgtcttgggttgggatgctcgcctcgccgcactccgcgccggccggcgcatgatgatgacgggaacctcaccgtacatcaataaccaatcctcgtcttttcaatcttcctcgtatattcctaggctagaggcaagcttcatgcgcgacttcacatgttgcgaccagcggtggccgacgctgcacgacctcctccagcactacgaggaacatcaccacccgactacgacgcccaacacctcaaaagatgccttcggtgcgacccaaccaaattctcgcgctacaagccgcgcgggctccgtcgcgccttccgcaggcaggacacagcaggcttcgcaatcgttacatggttttccgcagcagcggcaggctggttccggcatgggcgtcggcgggatcgggcagatgatgcgccagcagcagcaacagcaaaaacaacaacaagcgacggggtcctcccagaaagccaacgccttgtcgtctcacatgaacgacgagatggatacggtcggcgacatggaaatggacgaaacggttggcccaatggacatggacgacaacacgcgcaccattcaagcgacccgcgagcttttcggtcaacaacagaggccccagctgcacctgaatagttccggtcttcctcaccaagcactccgcacctcccagccccccacaccagctgccgtcagcttcgggttccagaacaacccgaccgtctcgtcggtcaacacaccgaccttgacgacacagcagcagggagtgccgcaacgcggacaacagtttgggcaggatgggaacggtgacgaggacgaagagattgccggcatgcctatgaagatgaatcttggcaacatgaacttgggcggctcgcaactcggagggttagcgttcggcgccttgggcacgatcgacgatcccgccaagcgtctgtatagtcccgggggcacaaatcagatgactagccaacagcgagccttggaccaacagatgcagttgcaacaacagttgcagcagcacctgcaagccatgaaccttgacctcagccagttcccgcccggcaccgatcctgccctcatcctgcagcagatgacggctctaatgatgccgcctgccgaggagcacaagcccttcaggtgtcccgttatcgggtgcgaaaaggcgtacaagaaccagaatggattgaagtatcacaagacccatgggcattcaactcagcagctgcatgagaacggcgatggtaccttctctatcgtcaacccagagactagtactccttacccggggacgttggggatggagaaggagaagcccttcaagtgcgaagtttgcggaaagcgctacaagaatctgaacggcttgaaatatcacaaacaacattcgcccatgtgcgatcccgacataagggcgcatcatcagtcgatcctgacgtcgatgatgcagaaccccgccgcttttctcgcgctccaacaaggcttgcccaacatcaacgaggatgcgatgctctag

SEQ ID NO: 5007 - protein, 702 aa, Myceliophthora thermophilia
MPSRSWTQWFNSKADPEAAEPAGTHCNKNSTRNHTSPTHSDSPSPLDHSPRSPSPTPQPATPCLAVLGHTVTSQQVAFAGPAQKYPPRASSPAIAGGQDDFDYSYTTGRITNIADAADTDLALDIDTKDVDMTTGPDFGSATGRSRQDSFVSAGAKPISMTNPNREHANRARRESLAGSLMGGMSWGGISVGSFIREDPSDRVLGWDARLAALRAGRRMMMTGTSPYINNQSSSFQSSSYIPRLEASFMRDFTCCDQRWPTLHDLLQHYEEHHHPTTTPNTSKDAFGATQPNSRATSRAGSVAPSAGRTQQASQSLHGFPQQRQAGSGMGVGGIGQMMRQQQQQQKQQQATGSSQKANALSSHMNDEMDTVGDMEMDETVGPMDMDDNTRTIQATRELFGQQQRPQLHLNSSGLPHQALRTSQPPTPAAVSFGFQNNPTVSSVNTPTLTTQQQGVPQRGQQFGQDGNGDEDEEIAGMPMKMNLGNMNLGGSQLGGLAFGALGTIDDPAKRLYSPGGTNQMTSQQRALDQQMQLQQQLQQHLQAMNLDLSQFPPGTDPALILQQMTALMMPPAEEHKPFRCPVIGCEKAYKNQNGLKYHKTHGHSTQQLHENGDGTFSIVNPETSTPYPGTLGMEKEKPFKCEVCGKRYKNLNGLKYHKQHSPMCDPDIRAHHQSILTSMMQNPAAFLALQQGLPNINEDAML

SEQ ID NO: 5008 - DNA, 690 bp, Myceliophthora thermophilia
atgcagccagggatcccggctgaagttcacggccaacagccgtatcctcagctggccatgccgtccctccagaatatggccccagcgctgaaaccgtctgggagcgacagccatggccctgatccaaaggcgtcgagcacccgcagttcatccaagccgggggacatgaatgcgacttggaggtcgtacccgggggattctcctatcacggccgcattttcttatgtaccacagggccccccccaatcggccacctggtcggcacctgtcggctctgacacgtcctcgcgggatgatgttgcctggtcgacatatcctgcaccacccccgcggtccatgtcttttggcgccgagagcatgagtggccaccagcaatacccgtcaatatcgcagattagcaaccattcagcccgagcgtacgaccgcaagtcgagtttggtgtcagcagacatgtacccgccgccgatcgcgaccaccatcccggggattgagacggtaccaggtacctccatggaccatgctgcttcactttcagcaggagcggttcctccatccacctatgctccatggcagcagtcgtacacgtactcgaagcctgctgaaggctatggcggatggtatggggacgcaggtgaccagggctcgtcgacacacggacatccctcctcgaacgtgtactatgggcggtag

SEQ ID NO: 5009 - protein, 229 aa, Myceliophthora thermophilia
MQPGIPAEVHGQQPYPQLAMPSLQNMAPALKPSGSDSHGPDPKASSTRSSSKPGDMNATWRSYPGDSPITAAFSYVPQGPPQSATWSAPVGSDTSSRDDVAWSTYPAPPPRSMSFGAESMSGHQQYPSISQISNHSARAYDRKSSLVSADMYPPPIATTIPGIETVPGTSMDHAASLSAGAVPPSTYAPWQQSYTYSKPAEGYGGWYGDAGDQGSSTHGHPSSNVYYGR

SEQ ID NO: 5010 - DNA, 2370 bp, Myceliophthora thermophilia
atgtcttccaatccccgcaggacgccggtgactcgctccggctcgaggggcctgagcattaagaccaatgtgtccctcaagaagggtgcgacttttcactccccaacctcgccgctggaatcccccgagcctgtctttacgccgccctccttgcctcgccggtcgcacaccagcttggacgatgtcatcgatgctcaccgtcgccgggttgccttgactctcggagacattgacaagactcttaccggccttgtcaaggacgactccaccgccacgcccgtccgcaagactctgcgagacgacacgctccctcttcctcaaggtgtgctcaaccacaccctggactcggtcatgggcaaggggcagccggccgagcgccgggtgctccggcctcgcatccgccgcccttctcgctttcacgagtccgatagcggcttgggcacttcggtcgcttccaccaaggagaaagaggatgccgggaagaaggagaagcagagcaggacaaccgccgttacaaggtcggctgctgctcggtcggccagtgctgcaacccccgctggcctcagccctcgcgctacgagccgcatttgcgagcataccctgaagccgctgcttgcgaatgccagcttcaaggacttccacccgctcctcctggagtgcccgcgaaagatgcaggagaagcagattgtttgcctcagggacctcgaaaagacactgcttctcgtcgctcctgtaagtgagctccttgctgaccaaggtgtgaggggagatacttaccgcgccttgcttttgaaggagaggaccaaggttgccgagctctacctcgacttctgcctcacgaccatccgctgcatccaggccaccgtcgagtatctcagcgaccgggagcagactcgccctcgcgacgttccgtacagcagcgggtacttcatcgacctcgtcgaccaaatccggaactacgctcagcagctcgccgacgccaaggagaaaggcaatcaggacgagatggacgtcgatccgtacgtgcagactcatccgctcgcctccactgatcatactgacgtgtcacctagcactgatgagatcaagcttcatgggggcattcacattaatggacgccctgccgagcttgtccgcgtcaagaagaacggcaagatgatctcgatggccaccggcgagccgattgagaagctcgaggaggaggccgacggcacggtgcgcttcaagcgctctgccagcgaggagctccgggacgaagaggagatcatgcgctcgatggccaggcgcaagaagaacgccacccccgaggagctcgctccaaagaggtgccgcgagcatggttgcaacaaggagttcaagcgcccctgtgacctgaccaagcacgagaagacgcactcgcgcccttggaagtgccctgttactacgtgcaagtaccacgagtatgggtggccgaccgagaaggagatggatcgccatcacaatgacaagcacgcggctagccctcccatgtttgagtgcttgtacaagccgtgcccatacaagtcgaagcgggagtccaactgcaagcagcacatggagaaggcccacggctggacctatatccgcaccaagaccaacggcaagaagacctcgagcgcgagtgtcaacggtaactcggcgcatccgactcctcagctgcagaacattccgaccccctccagcgagcacagcatgggagtggccactccccccgatacctggggccaggtctacgggaacagcagcctcgacttccccgcgtacattcccaatgacgccgacttgagcatgattcctcaggagatctctcttgatttctctcccgtcgacaacccgaccccatccacggattctggtatggaccacaactcagcctaccaggacatcggcacggacttcaccttgtatgacgacatctacagtgcccgcgtgcaactgcccactcctcctcctatccaaaccaacctttatcccaagcaactgccccagcagttcaacccctttaccacagcggacttctgccagccgcagcctcagccgcagccggcgcagctgtcgccaactggccaagggaatgccatgctgtacactccggattcgcttgctgaggcggatgagggtttcgatgagcatggcgagttcgccgccatggctaatgccgtcaacggcggagacttcatcctgttccccaatggcggaacttcgaagccgatgttccatgaatccctgtttgcgacaactgaggctcctggcctagctgcgagccacgcccatccgtcgtctcaggacttgctgaacgcgttcaacgttgactggtccgcacacgacctcaacgctttcttgccgtattaa

SEQ ID NO: 5011 - protein, 789 aa, Myceliophthora thermophilia
MSSNPRRTPVTRSGSRGLSIKTNVSLKKGATFHSPTSPLESPEPVFTPPSLPRRSHTSLDDVIDAHRRRVALTLGDIDKTLTGLVKDDSTATPVRKTLRDDTLPLPQGVLNHTLDSVMGKGQPAERRVLRPRIRRPSRFHESDSGLGTSVASTKEKEDAGKKEKQSRTTAVTRSAAARSASAATPAGLSPRATSRICEHTLKPLLANASFKDFHPLLLECPRKMQEKQIVCLRDLEKTLLLVAPVSELLADQGVRGDTYRALLLKERTKVAELYLDFCLTTIRCIQATVEYLSDREQTRPRDVPYSSGYFIDLVDQIRNYAQQLADAKEKGNQDEMDVDPYVQTHPLASTDHTDVSPSTDEIKLHGGIHINGRPAELVRVKKNGKMISMATGEPIEKLEEEADGTVRFKRSASEELRDEEEIMRSMARRKKNATPEELAPKRCREHGCNKEFKRPCDLTKHEKTHSRPWKCPVTTCKYHEYGWPTEKEMDRHHNDKHAASPPMFECLYKPCPYKSKRESNCKQHMEKAHGWTYIRTKTNGKKTSSASVNGNSAHPTPQLQNIPTPSSEHSMGVATPPDTWGQVYGNSSLDFPAYIPNDADLSMIPQEISLDFSPVDNPTPSTDSGMDHNSAYQDIGTDFTLYDDIYSARVQLPTPPPIQTNLYPKQLPQQFNPFTTADFCQPQPQPQPAQLSPTGQGNAMLYTPDSLAEADEGFDEHGEFAAMANAVNGGDFILFPNGGTSKPMFHESLFATTEAPGLAASHAHPSSQDLLNAFNVDWSAHDLNAFLPY

SEQ ID NO: 5012 - DNA, 1932 bp, Myceliophthora thermophilia
atggcttcggaacggggccccaccgcaacagaaccaccgcgtgcgccgtcggcctcgaccgtgccgcagtccggaccgtctttcgggacggtaaccgagctggcccggtccaagccgctcaagcgaacgcgggagacgacgccaacctcacaggactcgttggtttcgagtggcgacatgtcgccgtccaaaatagcccggctggtagggtttgccaggcagtcacagaacccatcgacgggcgaagctgaggaagacgcgagaagtagacaagaggaggaagagcaccgacagctcgctcggttggaacagagcgacaaccagccccctactgacgagctaatgtcgggcgtcacggcagacatgaaccggccccaagaggcgccaccagacagctctgggcattccgacatcgaagctgcggcggccgcggcagctgcgcgggcgctcagctcggtcaccattccgacgagccacgttcccggcgatgacctccacgatgtcagtccgcaaagcggcgcaagcggggcaagcctaggcggtgacaacggccaagtagtcgacagcccggcggcgatggacgtcgactctcgcaatgacgagggcctttatgcgccacagcccgaggcgccgatggaggacaaggcggggtcatctctctcatatccgggggccatgcctgcgcccggccatccgcaaagggtcatgagcatgtccatcgccggaccccagacgccaaacatcgacctcacaccgcgctcgccaaactccaacaagaagcacaagtgtccttattgtgaaaccgagttcactcgccatcataacctcaaaagccatctactcacgcatagtcaggagaagccgtacgtctgtaactcgtgccagatgcggttccgccgcctgcatgatctcaagcgacacagcaaattacataccggcgagaagccgcatgtctgtccgagctgcgataggaagtttgcacgcggcgacgcgttggccaggcacagcaagggcgccggcggttgcgcgggcaggaggcagacgatgggctcctttgcccgtcaagagaacttcgacggcggaacagacggttctgccatgtcgggggagctgtacgatggtggtggggccgacatgtcagaagaggaccggcgccgcctgagcatgccgaacctcaagccgcaacacgttgctggtcaggccggggcggaaggctatggcgggtcgaatacctaccccccaccgggacagcggccgggccctcccagcggcggtttgtatccgcccaacctcgaccgcgcatcctcagccacaacaaacacgtcgcccagtatgccgagcagccatactccgcaaaccagtatatcgtcggtcccgctgagcgcgggcgcttcgaccgtgtactcgcagggcggcatgaccgagagccccaaaccgctgagtccgagcggcactcagggaagtgcggcagggcagcaacgggcgagcaacgagcagcagcagcagcagcagcagggcgctccgggtttgtctctgcctacgcatggtatgtcgccagccgccaaacaagcgtggctctctcagtacccccctgctgaccgagacgcgattcaaggcagcgcagcgcaaggccagcccgcggccggccgtgggcgcgcccgcgcagcgagcggtgacaacaatggcaactccggccagccggatccgggcttgtgggcttattaccagcatttggaaggaactgtcaaacggctcagcagccagatggagagtgaagccaggaccaaagcgcagctgttggagaagctcaatgcgcacgagcagcatatcgccgcgttgacggccgaggtcgccgcgctgcggcaacaggtagctcccccgccacaggagggcgagggttcttcggctgacccagctgccgctcagcagtag

SEQ ID NO: 5013 - protein, 643 aa, Myceliophthora thermophilia
MASERGPTATEPPRAPSASTVPQSGPSFGTVTELARSKPLKRTRETTPTSQDSLVSSGDMSPSKIARLVGFARQSQNPSTGEAEEDARSRQEEEEHRQLARLEQSDNQPPTDELMSGVTADMNRPQEAPPDSSGHSDIEAAAAAAAARALSSVTIPTSHVPGDDLHDVSPQSGASGASLGGDNGQVVDSPAAMDVDSRNDEGLYAPQPEAPMEDKAGSSLSYPGAMPAPGHPQRVMSMSIAGPQTPNIDLTPRSPNSNKKHKCPYCETEFTRHHNLKSHLLTHSQEKPYVCNSCQMRFRRLHDLKRHSKLHTGEKPHVCPSCDRKFARGDALARHSKGAGGCAGRRQTMGSFARQENFDGGTDGSAMSGELYDGGGADMSEEDRRRLSMPNLKPQHVAGQAGAEGYGGSNTYPPPGQRPGPPSGGLYPPNLDRASSATTNTSPSMPSSHTPQTSISSVPLSAGASTVYSQGGMTESPKPLSPSGTQGSAAGQQRASNEQQQQQQQGAPGLSLPTHGMSPAAKQAWLSQYPPADRDAIQGSAAQGQPAAGRGRARAASGDNNGNSGQPDPGLWAYYQHLEGTVKRLSSQMESEARTKAQLLEKLNAHEQHIAALTAEVAALRQQVAPPPQEGEGSSADPAAAQQ

SEQ ID NO: 5014 - DNA, 1857 bp, Myceliophthora thermophilia
atgcagtggacgcaccccgcgagccacccagccacgctgcgccagattctatgtcgacgtttcctcaacatcgagcgatgcacgatgcgggtccatttaccccagccatccaaaccggacatcaccatggctcgcacgcccttcatcagcaagccgccatacgaggacaaggtcaccaaggacggcactacagctcgcatggtcctcctgtttctgcgggaactactcgagcagctatctctcggggagcaagctcagcagagctatggatgccccatgacccgctgccacaggagcttcgcggccccgctgcaggtcgtccagcacctcctgtcctgcccggagctccctaacggcgagttcgattgcgacaagtgcagtactagccacagcttcccgaccaacgagaaggattgggcgcagtgggtgggctggcgatcgccgcaacccatgcacatccagcggaaacggagcctcgggtccaagatgaaggactttgctctgcgcaagaaggacccgtcgcgcaagcaaacttcggcctttgactcgaacttcaagaacgcttcctccatggacacgcgacccagcacggccacctctgacgcgcccagctctatcttcactactaaaggcttccaacagcatgccgtcttccccggccagaatccggaaccaccctccttctcggctgtccagaagccggtgctgccatcgagcctccccgaggtcgatcccggcatgttctggcccggtttcaacgggaccgcttctgacctcccgtcgacggtgtcctcagttgccctttcttccacagtggatgaaacccaatctgagcgtctttcgcaaaacacttcgcagagcacgctttttacctcgaacctagatccataccaaaacacggttggctcgccacaagactccgacatctcggcctcacaacaatacatgtaccctccacaactacccttcaaccccggtctgacatctattcctagccatgtaccaaccacgtcgtccatgtgcctagacgagcctctcccgttgtcgcagagccctgtccccccggcagaccttcgctcggccggctcaaatgacaacgggtggtggcggccaaaggcagaggccgagacacctcagcccacaccaccatcgtccggcccggatcctggcttccccctccaggctaacgtgctgggcggcctagcgcaggggattggcagcgggatgtcgagtccgacatcgccgagcacagccgcatctccgttttaccaaatacagcaaccaccgtcgacccagtccatgtcgcgggcgctgagccaagagtcgatgcaaagcggcatgacgacagtctttgggacgccgatttcagaaggaggcgggcccggcgctgcaacaccacgcgccgagagccaccaaccacccgcccaccaacacaatcaacaacaaggtcagcagtcagctgctgtctcgagcaaacaagagacggcgtcggtcgaagacctcgtctgcgacgagtgccaatggaagcccaggggcgtcagggagaatctgaaagggtacctgcgcaagcacaaaaatacccacaaaggtgtccggctagcgtgcgacgtgccgggatgcgtcaagacgttcagccggctggacaatctcaagaaacacaagaaggacaagcacggaatagaagacgccggcggctctgggagtgcgaagcgcgcggcgggcgagtcggccgggaacggtgcccaacaggaggcggagtcgaagcggccacccacccgcgagtcgcaccacatgcccatgagcgtccccatcgtgtcggaggattattccatgctgtggcccgcgctgcatttttaa

SEQ ID NO: 5015 - protein, 618 aa, Myceliophthora thermophilia
MQWTHPASHPATLRQILCRRFLNIERCTMRVHLPQPSKPDITMARTPFISKPPYEDKVTKDGTTARMVLLFLRELLEQLSLGEQAQQSYGCPMTRCHRSFAAPLQVVQHLLSCPELPNGEFDCDKCSTSHSFPTNEKDWAQWVGWRSPQPMHIQRKRSLGSKMKDFALRKKDPSRKQTSAFDSNFKNASSMDTRPSTATSDAPSSIFTTKGFQQHAVFPGQNPEPPSFSAVQKPVLPSSLPEVDPGMFWPGFNGTASDLPSTVSSVALSSTVDETQSERLSQNTSQSTLFTSNLDPYQNTVGSPQDSDISASQQYMYPPQLPFNPGLTSIPSHVPTTSSMCLDEPLPLSQSPVPPADLRSAGSNDNGWWRPKAEAETPQPTPPSSGPDPGFPLQANVLGGLAQGIGSGMSSPTSPSTAASPFYQIQQPPSTQSMSRALSQESMQSGMTTVFGTPISEGGGPGAATPRAESHQPPAHQHNQQQGQQSAAVSSKQETASVEDLVCDECQWKPRGVRENLKGYLRKHKNTHKGVRLACDVPGCVKTFSRLDNLKKHKKDKHGIEDAGGSGSAKRAAGESAGNGAQQEAESKRPPTRESHHMPMSVPIVSEDYSMLWPALHF

SEQ ID NO: 5016 - DNA, 2616 bp, Myceliophthora thermophilia
atggccgccttggaccagatggatttcctgatgcatcaggccgaccctgcgacgagtgcggcgccaggctcaggcttccacgggctaccgcagcaccaaggatgcccgtacttccgtaaccagcaacatctcaacgggtcgagccttcctcctccgcactttgacccaaattttcaccccatgccgcaccagctgccacacctctcacagctgtcacacagcacagggcatccttcctccgcccagagtcggccatttaactcgcctgcggatgaaaaccggggaagtcgctcgcagcagcaagagcaacagcacgagcagcagcagcagcagcagcagcagcaacctcaggcccagcaccagccacagctccagtcccaatcacgctctcaaccacagcaatcgcagcaacctcaacaaccacagcagcagcagcagcagcagcagcaactccctcctctccaaccaccaactcttccgtatccgcagccctattcacacccgcatcactctcactcccaatctcaccccccttacgatccggtgcacgccgccagcgccgcatggttccagggttcgagtcaaggcagcacttggtccgctcctcctttccacgcccatcacgcgccggccacccaaccgccacatctcaggccaccggccgctgaggcgcactttggcggtcccggaagcgggtcaggcattgtgcaacaaggccccgtcggtccaagccagcaatttctcccacaccacgatccctactcgccctttagttttcccggattccaccgtcccgtgacctacccgcgctcatcgatggtcctgccgactcctccgcagctctccggccaccaacaacaccagcaatacccgcagcaccagcagcagccaaccagacaacagcatcacatggacgagacccagccaaaccagccgggccagccgggccagccgggccaggccacaaacactcactccccgcaagctgccatgagtagcgaccgaggcgcccctacgccgggtcggagcgcatttgcgctaccctccctcagccccagctcacatcagcctccgacaggttcgcagccgcatccacagccagctgctgcctcgcgagaatcgagcccgcatgcctcggccgccgcagctgcaccagctggcccagccaaccgtacgcccatcttccgacatccggacgggcacttagacacgtccaaccgtggcggacctgcggaaggcggcccctcgtcggcggctcccgcgccccagctgccgccgccttcagatttcccgaccacgcatgctaatcaatcggagggcttctttagagccacgcagcggaacttgccgcccggccctggtcaaccactcggttcttcgaacagcgccgttccaggcttttccagccggcgccgccatagtctcgcgcgccgtctgcagcagtcagaccacgatagtgacgaggatccgggctcgtcggcagacgaggaggagcagatgatgcgttacatagacgagtttggcgtcaacccagcccacttccgctctctgatggccgaggaccacatccgagccacccaaatcatccgcggccagttgaccaacaagcgggtggcgtctagaagggccattgcccagctccagagtgtcgagctggacagcctgcccgagacggagcgaacgtgcgtcatctgctacaacgacttcggccagaagagcccagagggcgtgattgaagccccgttgcgtctacccaagtgccaacatgtttttggcgaccactgcatcaagaaatggtttgaagaatctgacagctgtccgtactgccgcgacaaggttccatcggaactgcaagtcgtccccggcgtccgggctttccacaacatcttccgcatgcgcaaccgcatatctgccggagccgcacccaatcctaacgatgattcttttttccgcctcatcgcgcaccaggagtatcatgaaaccgccgtcggccgtcttagagcccaacgggagggggcgtcggacaccacgacgtctaccccgagaccccctcaacggagatcccctccttcggaggccgagaaccggaggcgaacacgtgtccgtcatagcagctttcaatccggataccccgttggcttgtatgccagccccgcggccaatcgttcctcggcaagtgcctcggcaccggcgcagcagagcccgacccgtgagcgtgtaattacccctagcgatttccattggcctggtctgcctgcggaaggtccggatatgttgctgactcgttaccttgcgggacagttcctgccgggcactcagcgctacttctacgcccctattaacccggcgaacccctccaacgcaaccctccagcacgaccagcccatgccaaatacgaacccgacttcctcgggacttcgaataagcagtgcagcccccgtacatagtttcccaagcagttctcagacgtactactccaacatgtcctttggcaatgctcccccagctacgttcccgcagcagctgcccccgctcagtgcgtcgggtttccagaaccccgcgaacagcggcaccggtgttcccagcaccggtggtacggagaaccagatgcagtag

SEQ ID NO: 5017 - protein, 871 aa, Myceliophthora thermophilia
MAALDQMDFLMHQADPATSAAPGSGFHGLPQHQGCPYFRNQQHLNGSSLPPPHFDPNFHPMPHQLPHLSQLSHSTGHPSSAQSRPFNSPADENRGSRSQQQEQQHEQQQQQQQQQPQAQHQPQLQSQSRSQPQQSQQPQQPQQQQQQQQQLPPLQPPTLPYPQPYSHPHHSHSQSHPPYDPVHAASAAWFQGSSQGSTWSAPPFHAHHAPATQPPHLRPPAAEAHFGGPGSGSGIVQQGPVGPSQQFLPHHDPYSPFSFPGFHRPVTYPRSSMVLPTPPQLSGHQQHQQYPQHQQQPTRQQHHMDETQPNQPGQPGQPGQATNTHSPQAAMSSDRGAPTPGRSAFALPSLSPSSHQPPTGSQPHPQPAAASRESSPHASAAAAAPAGPANRTPIFRHPDGHLDTSNRGGPAEGGPSSAAPAPQLPPPSDFPTTHANQSEGFFRATQRNLPPGPGQPLGSSNSAVPGFSSRRRHSLARRLQQSDHDSDEDPGSSADEEEQMMRYIDEFGVNPAHFRSLMAEDHIRATQIIRGQLTNKRVASRRAIAQLQSVELDSLPETERTCVICYNDFGQKSPEGVIEAPLRLPKCQHVFGDHCIKKWFEESDSCPYCRDKVPSELQVVPGVRAFHNIFRMRNRISAGAAPNPNDDSFFRLIAHQEYHETAVGRLRAQREGASDTTTSTPRPPQRRSPPSEAENRRRTRVRHSSFQSGYPVGLYASPAANRSSASASAPAQQSPTRERVITPSDFHWPGLPAEGPDMLLTRYLAGQFLPGTQRYFYAPINPANPSNATLQHDQPMPNTNPTSSGLRISSAAPVHSFPSSSQTYYSNMSFGNAPPATFPQQLPPLSASGFQNPANSGTGVPSTGGTENQMQ

SEQ ID NO: 5018 - DNA, 966 bp, Myceliophthora thermophilia
atgatggaatacgcgcaataccagcaacaaccgcaaaacgcacattctcaaccgcacattcagacgggataccctacctcagcagccggcaacaacattacatcaccatccactcaacacttgtcccagacttcacccatacttccgtcgcagcagcatcagccttcaccgacacaaccgcacaatatgtaccagccacagtacacagtggcacagcaacccatgcattatggcatgcccgggatccaggctgcggccatggccgccactgctgccgcctccgggtcttcgtatccttacatgccgtctgaccccagcctgcagcaatccccgaggatgtcgggtgtcggcgcaaagaaggacaacagggccgggccgcgatcgccgcagcaaatgaacaacattccccagcagcggcggctcagccaagtcgccagccccggtgtcccgaacgggtcgaccatgttgaaccacggggggccccgctcggcagttccccctcagatgacagcggcacagcaaatgccaccaccgcagtctcccgagatggcctccggagcggtagaagagtcgcctctctacgtgaacgccaagcagtttcaccggatcctgaagcgcagggttgctcggcaaaggttggaggaggcgcttcggctgactagcaagggtcgtaagccatacctgcacgagtcgaggcacaaccatgccatgcgccgacctcgcgggcccggcgggcgcttcctaacggccgaggaggttgcgcagatggaaagagagaaggcggcagcggcggcggccgccaacaattcggcagagaagaccgagggatcggagcagcctgccagcgcgaagactgcgacgggggcgacaaagcgcaagtcagagagcgatgcgtcggactcgccgtccaagaagaacaagcaagagtcttcaacgcccgagggcgaagaggaaggggacgaataa

SEQ ID NO: 5019 - protein, 321 aa, Myceliophthora thermophilia
MMEYAQYQQQPQNAHSQPHIQTGYPTSAAGNNITSPSTQHLSQTSPILPSQQHQPSPTQPHNMYQPQYTVAQQPMHYGMPGIQAAAMAATAAASGSSYPYMPSDPSLQQSPRMSGVGAKKDNRAGPRSPQQMNNIPQQRRLSQVASPGVPNGSTMLNHGGPRSAVPPQMTAAQQMPPPQSPEMASGAVEESPLYVNAKQFHRILKRRVARQRLEEALRLTSKGRKPYLHESRHNHAMRRPRGPGGRFLTAEEVAQMEREKAAAAAAANNSAEKTEGSEQPASAKTATGATKRKSESDASDSPSKKNKQESSTPEGEEEGDE

SEQ ID NO: 5020 - DNA, 2556 bp, Myceliophthora thermophilia
atggatgaggacaaggcaggaggaatttccgacgctgcgccgccagctccccagtcgggctccacttcgacaagcgggaacaagcaggcactctctccagcgccctcagctgctcctccgtcaaacccggctgcagctcctccaggaggcccgaattcgggtacgtcgaagcgaaaaagaggcctcggtgtcgttacaccaaacgcttgtaccgaatgccgtaagaagcgcgccaaggttcgtacacgcccggggaccttgaatatctccttccggggctggcgggattctttggatgtacgctcacactgggtctccgcgcagtgcgacgggaacaagccctgcagtcggtgcaaggcgcaaaaggatgtcgaatgcgtatatgaattgcctgtccgccagtcgaaagagaacctccgtcacgagatcgaacagctacgccaacagcagcgcaacaatgagcgagtcatcgccgctcttgtgcgccccgatctttgggaagaagttctcgcacgcctgcgcagcggccagaccgtggaatccatctcagaatggcttgcagggaccaccccttccggaggcggcgcgttaccgtcgatcacccgcttgctgaaccaagggagcgctgctccgccaaccttatcgggttacggagctgccgcttcgagcagatatacgcaactcccgcccggtatgaatgcgcttagcccggtcagcagccagcagcaacacggtatccggcgcgaggcggaccagcagagcccctggcgaggtcactattccgcccagaatcgtccgaccccgagccctctcacggacgcatcgagctggaagacggacgtccaaaggcaagcacgattgcgcgtcggatcatgggtcgacagtcaaatcagcagctcggaaccggggagggggcgtacctttggccctgtcctgcttcccgacttccctgagatgcgagtccccccaggaacttggacgacagtaaccagcgacccagctctggttcagcacctgctggccctctacttttgttgggaatatccaacttttgcctcccttagcaaggagcacttcctcaaggatttcatggagggccggccccggttttgctcgccgatcctggtcaacgcgcttttggccctcggctgccgcttctcccgccggccaaacactcgatccaatcccgacgatccgcatacgtccggtaaccacttcttcaaggagtgtcaacgcctgttctaccaggaggaggaccaccacaaactcaccaccatccaggcgctaggcatcatgtccattagagaggccagctgcggcagagactctgagagctggtattatgctggtcagagcattcgtctggctatcgagatggggctccatcggctgcaagacgacgggcgggacgacgacgagagtgcagtccaagccgcaacgttttggggggcgtttgctctcgatcacgcgtggtccttagcaaccggctcactcccccagtgttcgtgcttccctcgccttccgccgaaaccggcaataatagacgacatcgaggcctcgctgcggatcccgtatacagatgacggcgcgcctttacagaggtcctgcgagcaaccctccaacgtccgctctgtctataagtgcttctgcgagcttagcgaactagttcaccagtcgttatacgttcttcattcgcctggcaggccgctcacaagcagggacttgctcgctatctatactcaatacctgaattggtatgacaggataccggaggtgctgcgcctcgggcacaacttcaccccggccgtcctattcgcacacatgtactatcactttgccatactccttctctttcgacccttaatcaagctgcgaatcatcggctcaagtatatccccgcgcgatgtctgctcgcaggcggccgatgcgattaccggactattgcgctcttatgcgcaactttacacgctgagacaaacaccatcgttcgtaccatattttgtcctcacatcatcaatcatgcacctcactttagcggcggtgaactccggtacccgacgagccgacaacggtggcccagcgcagggcgatgaccctcagaggccgccgcccaagtcggatcctcacgtcgtcgaggccatcggccgggggattgcagacctagcggagatggcgccctgccatcatttcgcagagcaggcgctgaatatactaaagttcatggccaagaagtggaacattgatgttgagatcaagaagatggcgggagacgaagcccgcgaagtggaattcaacgacgtggacaaggctacacggccggtcgcaggcagccttaacttcttcgtgcccaactttaaggaatcggacttcaactgcacgtgggggaatgcggtcccgggcctaggcgcagataaagaagccggaggcaagcttaaggacgtcgcagtgacagctgacagcccggagaatcctctgttctggccattccctatgcaaggccgtcccatgttgcctgctgggaaggagttagaggaggccgggttcgagttaatctag

SEQ ID NO: 5021 - protein, 851 aa, Myceliophthora thermophilia
MDEDKAGGISDAAPPAPQSGSTSTSGNKQALSPAPSAAPPSNPAAAPPGGPNSGTSKRKRGLGVVTPNACTECRKKRAKVRTRPGTLNISFRGWRDSLDVRSHWVSAQCDGNKPCSRCKAQKDVECVYELPVRQSKENLRHEIEQLRQQQRNNERVIAALVRPDLWEEVLARLRSGQTVESISEWLAGTTPSGGGALPSITRLLNQGSAAPPTLSGYGAAASSRYTQLPPGMNALSPVSSQQQHGIRREADQQSPWRGHYSAQNRPTPSPLTDASSWKTDVQRQARLRVGSWVDSQISSSEPGRGRTFGPVLLPDFPEMRVPPGTWTTVTSDPALVQHLLALYFCWEYPTFASLSKEHFLKDFMEGRPRFCSPILVNALLALGCRFSRRPNTRSNPDDPHTSGNHFFKECQRLFYQEEDHHKLTTIQALGIMSIREASCGRDSESWYYAGQSIRLAIEMGLHRLQDDGRDDDESAVQAATFWGAFALDHAWSLATGSLPQCSCFPRLPPKPAIIDDIEASLRIPYTDDGAPLQRSCEQPSNVRSVYKCFCELSELVHQSLYVLHSPGRPLTSRDLLAIYTQYLNWYDRIPEVLRLGHNFTPAVLFAHMYYHFAILLLFRPLIKLRIIGSSISPRDVCSQAADAITGLLRSYAQLYTLRQTPSFVPYFVLTSSIMHLTLAAVNSGTRRADNGGPAQGDDPQRPPPKSDPHVVEAIGRGIADLAEMAPCHHFAEQALNILKFMAKKWNIDVEIKKMAGDEAREVEFNDVDKATRPVAGSLNFFVPNFKESDFNCTWGNAVPGLGADKEAGGKLKDVAVTADSPENPLFWPFPMQGRPMLPAGKELEEAGFELI

SEQ ID NO: 5022 - DNA, 990 bp, Myceliophthora thermophilia
atggcaagcaccatggtcgcaacgcactatgcgcctggggcccaacaaagcctccattacccttacatgccaccgccctcaccgcccatggatgagaccgccaagtgctcgttgccttccatctcaaacctgctcgggcttgccgaccaagggtcaccgacctcagaaacgtcgccccagtctcagcagcaaccgcaacagcaacaatctcaggtaaccacgcctgataccaggccaaactcttcgcactatggcaatccagcaatgctccggacggggcttcctcccagcccgcccatgtcctcggatgcctcgtttgagggtttcaactcgccgtcgaccaggtcggtgagccaagtgccgaatagttcaaactactatttcgagacgacaccaccgctcccggtggaggccgatacgcgacagatgaacgccactgctgcggttccgcgagtctcggtccagccctcgacctatcagccccagttcgccggttctgcgtacgcgagtcagcctgccgtatcatcgtactactctcccatccaagccgcagggcaatcccagacgcaggtgtccggcctctattatcagcggccactccctcagtctttcccgcccccgctgcccatgtcagtgactctggccccggcgaccggcaacccctggcagcatcaccactacatcgctccctcggcgtcggcatccttccctcagagccaagaccggtacatctgccagacgtgcaacaaggccttctcgcggccgagttccctccgcattcacagccattcccacacgggcgagaagcctttcaagtgccccttccccggctgcggcaaggcctttagcgttcgcagcaacatgaagaggcacgagcgcggatgtcacaactacgacagcagcagcagcagcagcaacgccgccgccgccgccgctactaccaccagtagcggcaacgggagcaaccctaacagtgggcgccgaccctga

SEQ ID NO: 5023 - protein, 329 aa, Myceliophthora thermophilia
MASTMVATHYAPGAQQSLHYPYMPPPSPPMDETAKCSLPSISNLLGLADQGSPTSETSPQSQQQPQQQQSQVTTPDTRPNSSHYGNPAMLRTGLPPSPPMSSDASFEGFNSPSTRSVSQVPNSSNYYFETTPPLPVEADTRQMNATAAVPRVSVQPSTYQPQFAGSAYASQPAVSSYYSPIQAAGQSQTQVSGLYYQRPLPQSFPPPLPMSVTLAPATGNPWQHHHYIAPSASASFPQSQDRYICQTCNKAFSRPSSLRIHSHSHTGEKPFKCPFPGCGKAFSVRSNMKRHERGCHNYDSSSSSSNAAAAAATTTSSGNGSNPNSGRRP

SEQ ID NO: 5024 - DNA, 1926 bp, Myceliophthora thermophilia
atggcagctatcgttgccaatacccccggctcggctatgaactccgggaaggctgatgcaacgtcgttgaggacgctgtctgtcacgactgcggccagccacgatcttccgagttctgtgtccagccccgcttcagtctccactcctacatcttcaacttcatcagtgcctccaatcgccatccggccgaacacatcaagcaaccctcctccggtcaggccttcaacagcaatgcacaatcggacggggcctggaatcatgactccagggtcagcgccgcaaccaaagactgttagcatgaccagcaaggagtgggtcatccctccccggccaaaaccaggccgcaaacctgctaccgacaccccgccaaccaagcgcaaggcccaaaaccgggccgcccaaagagcattcagggagcgcagggcggcccgtgtcggggagctggaggaacagctggagcaagacagggtcaagcacgagcagacggttcgcgagttacaggcgcggatcagtcatcttgaaatcgagacgcaaactctccagtcaaggtgccagtggctggaatcgatgctggagagggaacggcaaggtcgtgacaattgcgcaggagattgggaggctcggcaaggtggctcgaggaacaacagctcgatgtcaagtcagatacaaggtcagctcggacaatcacagagcatgcagccactgcagccggcaccatcgaaaacaggcacagcgcgcccagctcccatcattgagccgcgacctttggctcaaccgttctctatctctcagattgtctcgccgcctgaggagtctacacaagtgaataatgtggggtgtggcagctgcggggccagtggttcttgcgcctgtgcagaggaagtcctgcgcagcgcagatattcccattggctgcggcaaatgctcactgggcacgaggtgcgagtgcctcgaagagacgatacgggtatccattaccggtgccgacctaaagaggccaccgagcgcgccaccgtcaacgtcgccggaggataagaggcagcgctctgataccggcacggccctcgagacagacttcacggccattttcgcctcgcagaacagcaaggaagaggcacaggcgttgttacctgcgccggcacgatcgcaagcactggcatccatagagccgcgtgatccatgtggtttctgcaaggatggaacttattgtgtgtgcgcagattcaatgatgactccaacgtcgttggcggcccctgtcaatcaggctactgagcaaacgcagacgcacacgcctcctccatcggataatgatgttgttcccatgcccttggaagtcactgccacaggcgcgatcaaacttcccgggctgaagtcactgcaagagaggaaacccgccaaactgcccgcaagagcagggggttgcgggcctaatggccccggtacctgcgcccaatgcgtggccgacccgaagtctggcctcttctgccgctccctggcggccaactttgagaagaacaatgcgggggccagcaccgccgctgaaggcggctgctgcggaaacggtggcccaggcgggtgctgcaaatcgggctcctcgcagtcgcagcaagcagcggagactacctctctcccttccatggcctctagcgccggaagcaacggttccaacgccagcggtttcggtctaagcctctcctgtgccgacgcctacaagacgctggccagccaccggcactttgacgaagccgccgacgatatcggctcctggctacctaagctcaaggcgctgccggtcccgcgccaccccgggccggtgggcgggggcggccgtggccaccgcgatgcgcgggcaccaattgaggtggaggccgcgagcattatgagtgtgctcaaagactttgatgtaaggtttggcaggggtgagtga

SEQ ID NO: 5025 - protein, 641 aa, Myceliophthora thermophilia
MAAIVANTPGSAMNSGKADATSLRTLSVTTAASHDLPSSVSSPASVSTPTSSTSSVPPIAIRPNTSSNPPPVRPSTAMHNRTGPGIMTPGSAPQPKTVSMTSKEWVIPPRPKPGRKPATDTPPTKRKAQNRAAQRAFRERRAARVGELEEQLEQDRVKHEQTVRELQARISHLEIETQTLQSRCQWLESMLERERQGRDNCAGDWEARQGGSRNNSSMSSQIQGQLGQSQSMQPLQPAPSKTGTARPAPIIEPRPLAQPFSISQIVSPPEESTQVNNVGCGSCGASGSCACAEEVLRSADIPIGCGKCSLGTRCECLEETIRVSITGADLKRPPSAPPSTSPEDKRQRSDTGTALETDFTAIFASQNSKEEAQALLPAPARSQALASIEPRDPCGFCKDGTYCVCADSMMTPTSLAAPVNQATEQTQTHTPPPSDNDVVPMPLEVTATGAIKLPGLKSLQERKPAKLPARAGGCGPNGPGTCAQCVADPKSGLFCRSLAANFEKNNAGASTAAEGGCCGNGGPGGCCKSGSSQSQQAAETTSLPSMASSAGSNGSNASGFGLSLSCADAYKTLASHRHFDEAADDIGSWLPKLKALPVPRHPGPVGGGGRGHRDARAPIEVEAASIMSVLKDFDVRFGRGE

SEQ ID NO: 5026 - DNA, 3045 bp, Myceliophthora thermophilia
atggaccgcaacatgcattcgggctttcaaatgcccatccaaccgccgccgctcatgaatccgccgcctcagatttttggtggtggtgccggttatggcgaacttggaatgccgatgccgcagttctcgccagacttgatcactgcgcagatgtttggagaccatggcttgctggaagacacgaccgaggccaagagaaggaggatcgcgagggcgtgtgacatgtgccgcaagaagaagatcaagtgcgatgggaagctgccggcctgcacgcactgcaccaactacaagacggagtgcgtctttacccaggtagagaagaagcggagccctccaaagggatttggatggatcagcgccaagtacattgaggggctcgaaaaccgcttggggcgcatggagcacctgttgagattgtcaggattgctcggcgaggacgataacggggccactgacctcggaaccctggagaagaagctggtcgagaagcaccagcagtcaaggcaggcttcccaggcaatatccgacactgcgtcgccgcagccgacctcgggccaggatgggagcggctcgacaccccatagctcgctgacgtcccccgggcctgccaaggatggcgacaagaggaggtcggccactcccgaaaacgacagccaggacgacgaccgggaagatgttgctgaactgtctgagatgatgtgctcgctggtcaccaacaccaatggcgagacgcggtatattggttcctcttccgggttctccatcttctcgcccaagggggtgcaatgggtcaacgagaaaatgggagatacctcgttccagcagatgatatcggacgtctcgatggatgaccacaagtggaatgcctggaagcccgacgtctttggagacctcttccgccgcaccatcttcagggacttgcccccaaagcccgaggcgctgtccctgctcagggactactttgagaacttcaactgcatattcccgctcttccaccagccaaccttcatgcacctggtcgagcggcagtattccaacgacccttataccgggtccgggtggtgggccagcttgaacgtggccctcgccatcgcgcaccgcctgcgtgtcatgagcaatctggtcccgcaggaggaggacgagaaggcttgggggtacatgaagaacgccatggccgtgttttccgagctggcgatgcgcaacaccgacctgctcagcgtccaggcgcttctgggcatgtctctgttcatgcaagggactcccaacccgcagccgtccttcctcctcatcgcgacggccatccggctctcgcacaccatcggcctccacaagcgcgggaccaatttcaacctgaaccccatcgagatcgagcagcgcaaacgggtgttctggatcgcctacatgctggacaaggacctgtgcctccggtctggaaggccgccagcgcaggacgacaacgacatgaacgtggaacttcccgacgccgaccccgcggacggtatcggaaacatccccctggcggacggcaaggggaagatgaacctgttccgggtcatgtgcgagctcgccatcgtcgagagtaaagtgtacacgaggctgtactcgaccaaggcgaccaagcagtcggacggcgagctgttgaataccatcggagagctcgacaaggagctggaagagtggaaggaccgcatccccatcgacttccgcccagaacacgagatcaaggcgtcacatacgccgctcatcctccacattgtcatgttgcactttaactactacaactgtctcaccacgatccaccgcatgtcgatccaccacggttactggaccagccgcctgtccaatttcgccatccggggactcaatgcgaggccgttgaatcctcgcatcttctcgtcggccgccttgtgtacctcggctgcgagagcttcgatatccctcctcaagtacatcccgcaaggtgacttctcctgtgtctggatggtgttgtacttcccagtctcggcgcttgttaccttgtttggccatattctgcagaaccccctggatccaaaagcacgttccgacacgaagctcatgaacgtggtggtcaacttcctgtcgacgctcggccacgaggcggagacgggcggtgtccaccgcatgctcggtatctgctccgagtttgagcggatcgccaaggtggtgatcgagaaggcggaaaaggagcacgcctcgcggcggaaacggaagaaccaggaccagtcgcttaacaaatctgccgttgactccggcaacgcgaacacctctgcggccgactcgccgtccttcaacccgaacccggctccgccgacatctcgccccaccgcggcgaacgctgcgacgcctcaggcgagcgggaaccacacggtaacgagcaatcaaagatccatcccccctcaaggaaatgacagccgatcctccgcgaacgagagcaacaacaacaacaacaacaacagtagcagcaacagcagcagcagcaatgccaacagcaacggcaacggcaacggcaacggcagcaaaaacaatggctacggctccatgacaggcgccatgagccagtccccatccccaagcctcgcggcgacaggctggggacaagttggcgagttcacgcccgacagctcggattacaacaagagcgcctatgccgcggacatggcctcgttcgacacattggacacggccatgacggcgggcgggatggaaagtcccccgctcgtggggccggatggggagctcgtgttccagcagcccatgctgccgcaggatctgttcagtctgcccatgacgctggactggaactgggccgagatgagcgggggcgcgtatccgagcgtggagaacgggaattttggcggcggcgggatggatgggatggatgggatgggcgggatggccgtgggcgttgccggtggcgggaccactgtggggcatcatcaacaacaccacagcggcagcggcggcggcggcggcggcggggagggacgcgactttcgggcacaggggatgatgcaggggaggtga

SEQ ID NO: 5027 - protein, 1014 aa, Myceliophthora thermophilia
MDRNMHSGFQMPIQPPPLMNPPPQIFGGGAGYGELGMPMPQFSPDLITAQMFGDHGLLEDTTEAKRRRIARACDMCRKKKIKCDGKLPACTHCTNYKTECVFTQVEKKRSPPKGFGWISAKYIEGLENRLGRMEHLLRLSGLLGEDDNGATDLGTLEKKLVEKHQQSRQASQAISDTASPQPTSGQDGSGSTPHSSLTSPGPAKDGDKRRSATPENDSQDDDREDVAELSEMMCSLVTNTNGETRYIGSSSGFSIFSPKGVQWVNEKMGDTSFQQMISDVSMDDHKWNAWKPDVFGDLFRRTIFRDLPPKPEALSLLRDYFENFNCIFPLFHQPTFMHLVERQYSNDPYTGSGWWASLNVALAIAHRLRVMSNLVPQEEDEKAWGYMKNAMAVFSELAMRNTDLLSVQALLGMSLFMQGTPNPQPSFLLIATAIRLSHTIGLHKRGTNFNLNPIEIEQRKRVFWIAYMLDKDLCLRSGRPPAQDDNDMNVELPDADPADGIGNIPLADGKGKMNLFRVMCELAIVESKVYTRLYSTKATKQSDGELLNTIGELDKELEEWKDRIPIDFRPEHEIKASHTPLILHIVMLHFNYYNCLTTIHRMSIHHGYWTSRLSNFAIRGLNARPLNPRIFSSAALCTSAARASISLLKYIPQGDFSCVWMVLYFPVSALVTLFGHILQNPLDPKARSDTKLMNVVVNFLSTLGHEAETGGVHRMLGICSEFERIAKVVIEKAEKEHASRRKRKNQDQSLNKSAVDSGNANTSAADSPSFNPNPAPPTSRPTAANAATPQASGNHTVTSNQRSIPPQGNDSRSSANESNNNNNNNSSSNSSSSNANSNGNGNGNGSKNNGYGSMTGAMSQSPSPSLAATGWGQVGEFTPDSSDYNKSAYAADMASFDTLDTAMTAGGMESPPLVGPDGELVFQQPMLPQDLFSLPMTLDWNWAEMSGGAYPSVENGNFGGGGMDGMDGMGGMAVGVAGGGTTVGHHQQHHSGSGGGGGGGEGRDFRAQGMMQGR

SEQ ID NO: 5028 - DNA, 2691 bp, Myceliophthora thermophilia
atgcccggaatactgcccatgaaagtcatcaaggtgggcaccagctcacaaagtcgcatcgcccaggcttgcgacaggtgtcgcagcaagaagatccgttgcgatggcatccgtcccacctgctcgcagtgcgccaacgtcggcttcgagtgccgcaccagcgacaaattaagccgccgtgccttcccacggggctacaccgaatcgttggaggagcgtgtacgggcgctggaagcagaggtccgggagctaaaggacttgttggatgagaaggacgagaagatcgacatgctctcgaggatgcatggcaatcggcagtcgcagaacgaaaagtgccagagccaaccccccgccgacgcgaagaaggatgcaggcacaccggcaaaggaggacacgtttcgcgtccaggcctcgccgttgttgctgggcgtcgagaactcagattcttacttcatgggcgcctccagcgggcgcggattcattgaatccctcaagcgaaaaatgcaagagaacgggaagtcttgctccgacttcaaccccgaggcgttcttgcacatccaaggatgctaccctctcacggcaaaaccgcctagccaaacgatgaggataccgccgcgcctattctccgatagatgcgtcaacgtctatttccaggagtgggcgcctctgtttccagtcctccacaagcctaccttccttcgcgtctatgaagaattcgtcgcggatccagaaaagatcaggaacaaccacaagctcacccagctctatctggttttcgggatcgcagcgctatcaagcgagcaacaagatcttcaacaaatcgcggcttgcgagcagcaatggcagcggtccttggaggcgatcctcatggacaacaccatgatgaccctgcagtgcctgttgcttgcactgatctactgcgcgatcagggccgattacaagagactgcagcattacaaaggaatcgcggtcggactttcactccgactcggactgcaccagagccaaaaacggttctccttcggtgtgctcaccatcgagacccggaagaaagtcttctggactctctacactctcgactgcttctccgctgccatcctcgggctcccgaagctcctcaaagaggaggacgtccacactgagttcccctccgataccgacgacgagtacgttaccgagaaaggctttcagccgagccttccgggcgaggctactcgcttgtcaagtgcgctagccctgttccggggagcccggattttgagcaaggtcttggagaagatttatccctccgccacgtcccatgagctctcgctccagcaaatgtccgtacttgccggggagctcgacgattggtacgagaagctacctcctcaccttaaactcactttcaagcaagacaagccatcgaccgacgtgaccggcagcaggtcaccgatcctggcccttgcatactactacatccgtactcttatcttcaggcccgcggtgacctccagtctggggcctaaggctgctccggcgctcattgcggtcagcgaggcaagcaagcacatcattcagatcatccagctgctcgaggaaagaaacatgtccttttccctatgccttaacaaggcggacactctggttctctgcggcatggtgctactgtaccagaccctgggcttgaagcaggacagcaaattgctgaaagacaacgagaagttggtcaacgacgtgatcaaggccgcagataaggccaaagcgcctggctgttacgatctcaaacgcattgctcggatgctggtcaccatcgacgagccgccaccgcagtccctgccgacgcccccgaggcagagcccggatgcctgcctcaccgctccgccagcgcagcgacattcggtcagcgcctccaacaagccgcacgcgacgctcgggcgccacaacgctgctagcataagcgaaagcgatctgctgatgcagcaagaaaaactgcgcagaatgaccatgccgcatcctacccacccccggacggaacaagtacacccgcgtccccgaggatcgttcgacagccaaagaccgtcgattcccctctcgcagcgagatcaccgattgtccctgagccaagcccacgctgcacaggcagccctgctggggcgcctttcggcttctccacacaccaaacaccaatcgattgactacctccacgtagactcgccaacccagcccgactcccccgtgcactcccgtggcgccggcgggtcgcacccatcaatcaaccactctcaacaagcgcagctgtactcgcagctccagaaaggctccagtgtctcgacagccgagtgggaagcgctcctaggttctatcgagggcggccatctcaacgtgtacgacgccatttacgggggccccagcctttcgcttgcggaagcggcgaacgcgcccgtgtcagcgaccccaacgacgacgaacgacccgtggtccccggactcgtgggatttgacgggcttcaacctcggagattttgggtcggcgacgacggcgcacagcgtggtcagcctgagcgaggatgggctgagctcgagcgatgacatgggcagtgtcggtagcaccgctgctgccgggatggatttcaggggcggcctgggaatgccggtgacgacaacagatgggttcgtgctggatagcctggatgggccatttccgatgtga

SEQ ID NO: 5029 - protein, 896 aa, Myceliophthora thermophilia
MPGILPMKVIKVGTSSQSRIAQACDRCRSKKIRCDGIRPTCSQCANVGFECRTSDKLSRRAFPRGYTESLEERVRALEAEVRELKDLLDEKDEKIDMLSRMHGNRQSQNEKCQSQPPADAKKDAGTPAKEDTFRVQASPLLLGVENSDSYFMGASSGRGFIESLKRKMQENGKSCSDFNPEAFLHIQGCYPLTAKPPSQTMRIPPRLFSDRCVNVYFQEWAPLFPVLHKPTFLRVYEEFVADPEKIRNNHKLTQLYLVFGIAALSSEQQDLQQIAACEQQWQRSLEAILMDNTMMTLQCLLLALIYCAIRADYKRLQHYKGIAVGLSLRLGLHQSQKRFSFGVLTIETRKKVFWTLYTLDCFSAAILGLPKLLKEEDVHTEFPSDTDDEYVTEKGFQPSLPGEATRLSSALALFRGARILSKVLEKIYPSATSHELSLQQMSVLAGELDDWYEKLPPHLKLTFKQDKPSTDVTGSRSPILALAYYYIRTLIFRPAVTSSLGPKAAPALIAVSEASKHIIQIIQLLEERNMSFSLCLNKADTLVLCGMVLLYQTLGLKQDSKLLKDNEKLVNDVIKAADKAKAPGCYDLKRIARMLVTIDEPPPQSLPTPPRQSPDACLTAPPAQRHSVSASNKPHATLGRHNAASISESDLLMQQEKLRRMTMPHPTHPRTEQVHPRPRGSFDSQRPSIPLSQRDHRLSLSQAHAAQAALLGRLSASPHTKHQSIDYLHVDSPTQPDSPVHSRGAGGSHPSINHSQQAQLYSQLQKGSSVSTAEWEALLGSIEGGHLNVYDAIYGGPSLSLAEAANAPVSATPTTTNDPWSPDSWDLTGFNLGDFGSATTAHSVVSLSEDGLSSSDDMGSVGSTAAAGMDFRGGLGMPVTTTDGFVLDSLDGPFPM

SEQ ID NO: 5030 - DNA, 303 bp, Myceliophthora thermophilia
atggctaaggtcaagtgctcgttcgaggactgcaagctgcccgcccagcgcatcgtcggagactgcagcttctgccagggctcgttctgcaagaaccaccgcctgttggaggaccacaagtgccggaacctcgaagacgtaagttgcctcccagcgccgtcgcagtggtggctcgtcggcctgtcgggggtgctcggcgaggacacgctggctgaccttgtctccaagtgcaagagggaagcctttgagcagaacgcgaaccagctcaacaaggagcggacgcaggtcatcaagaccgcctaa

SEQ ID NO: 5031 - protein, 100 aa, Myceliophthora thermophilia
MAKVKCSFEDCKLPAQRIVGDCSFCQGSFCKNHRLLEDHKCRNLEDVSCLPAPSQWWLVGLSGVLGEDTLADLVSKCKREAFEQNANQLNKERTQVIKTA

SEQ ID NO: 5032 - DNA, 2181 bp, Myceliophthora thermophilia
atggccccggcccacgacgacgaggagctgtccatctcgctgtccccatcgcagatccggcgacgcaggcggccaggtgagggacaggaccagagcaccgacaacagccaccaccggcaccaccagacgacgaccccgcgctcatccatcgacgctgccgtcatggcctccggatccgcacccaccaccgcccaaaatgccccgctccgcgacaagacgcgcaccgagcagcgcatcggcgcctacaacatcgtcaagacgctcggagagggcagcttcggcaaggtcaagctggccgtccatcgcggcaccggccagcaggtcgccctcaagatcatctcgcgcaagaacctcatcagccgcgacatgcagggccgcgtcgagcgcgagattgagtacctccagctgctacgccatcctcacatcatcaaactttacaccgtcatcaagaccccgaccgagatcatcatggtccttgagtacgccggcggcgagctcttcgactacatcgtcgcccacggcaagatgcaggagagcgaggcccgacgtttcttccagcagatgctctgcgccgtcgagtactgccaccgccacaagattgtccatcgcgatctcaagcccgagaacctcctcctcgacgacaacctcaacgttaagattgccgactttggcctaagtaacatcatgacggacggtaacttcctcaaaacgagctgcggctcgcccaattacgccgcccccgaggttatcggcgggaagctgtacgcgggacccgaggttgacgtctggagctgcggcgtcatcctctacgtcctgctcgtcggccgcctccccttcgatcacgagcacattcccaccctgtttgccaagattgcccggggcagctacatggtgccgacctggatgagcccgggcgcagcgaacctcatcaagaagatgctcgttgtcaacccggtccagcgcgccaccatcgaggacatccgccaggacccctggttcctcaaggacctgcccgcctatcttcaaccgcccgtcgaagagttcctcaacacaggtgtcgacccaaacaaggccatcaaggtgagcgacattgcacctcacgcgccgccacaagagcaggaaaagctgcacaacgaggtgaccgagaagatcagcaagaccatgggctacggcaagcgggacgtggaagaggctctcgaagccgacgagccgtccgccatcaaggacgcttacatgatcgtgcgcgagaacaagatcatggagagcacccaactcgccggcctcgccacggacgatgctacaccgagcccgcacccggacccaaccatgtcgtccacccgctccgtagcttccaccagcacgggaacgtcatcagccagacccccctacgtgagcaaggtgggcatccttccgagcagcttgcccgtctatcacaaggccttcatggatcgcgaaagagcgcgggccgagggtatcgacatacccgaggcaccgattgccgtgccagaccccagctctcacacgcggagcccggccgagcaggaggaaaccctgcgtcgactgaagcctcattctcgcagtcttgtccccctcgatgacccgagccgtccccgagggcttacccccgtcaacccgccaaagaagaacaagcccatccggtggcagtttggcatccgctctaggaacgcgccctgggaagccctgctgtgtatctacaaggcgctgcacaagctcggagccgcatggatagtggatgaagactacgacttgtcccgccaggacgacgagaacggcgactgcagcggcagccgtcactcccgcaagcaaagctcgtcgtcgggcgtggacccgcgcgagttgtacaagctcccagctgacccgtggcacatcaagattcgctgggaaacaaacaacctccaaaagcattcggctgcgtccgggctcggcgagaccagcgcgaatccgcaggtcacccgcgaaggggaagactttgacatagtcgccatgcgtatggagatccagatctacgaaatggagcccggcgtcttcctcgtcgacttcaaggttgacgggtacgaaacgcccgagggaaagctcttcgaggacaaggaagtcgcgagcccattcccgttcctcgacatggccgccaggcttatcatgcagctggccgatgcggattag

SEQ ID NO: 5033 - protein, 726 aa, Myceliophthora thermophilia
MAPAHDDEELSISLSPSQIRRRRRPGEGQDQSTDNSHHRHHQTTTPRSSIDAAVMASGSAPTTAQNAPLRDKTRTEQRIGAYNIVKTLGEGSFGKVKLAVHRGTGQQVALKIISRKNLISRDMQGRVEREIEYLQLLRHPHIIKLYTVIKTPTEIIMVLEYAGGELFDYIVAHGKMQESEARRFFQQMLCAVEYCHRHKIVHRDLKPENLLLDDNLNVKIADFGLSNIMTDGNFLKTSCGSPNYAAPEVIGGKLYAGPEVDVWSCGVILYVLLVGRLPFDHEHIPTLFAKIARGSYMVPTWMSPGAANLIKKMLVVNPVQRATIEDIRQDPWFLKDLPAYLQPPVEEFLNTGVDPNKAIKVSDIAPHAPPQEQEKLHNEVTEKISKTMGYGKRDVEEALEADEPSAIKDAYMIVRENKIMESTQLAGLATDDATPSPHPDPTMSSTRSVASTSTGTSSARPPYVSKVGILPSSLPVYHKAFMDRERARAEGIDIPEAPIAVPDPSSHTRSPAEQEETLRRLKPHSRSLVPLDDPSRPRGLTPVNPPKKNKPIRWQFGIRSRNAPWEALLCIYKALHKLGAAWIVDEDYDLSRQDDENGDCSGSRHSRKQSSSSGVDPRELYKLPADPWHIKIRWETNNLQKHSAASGLGETSANPQVTREGEDFDIVAMRMEIQIYEMEPGVFLVDFKVDGYETPEGKLFEDKEVASPFPFLDMAARLIMQLADAD

SEQ ID NO: 5034 - DNA, 3033 bp, Myceliophthora thermophilia
atgacgccgccctatggcgacgacaggcggcacgtgagcttcgacaacagcccccagcccccggtctacagtcgtcagccgagctatcaaccgcagacgcccctgccgcaccctcagccctacgactacccgccgcagtatgcgtcccatggcgagctcccgtatccgattcaggtcgccgccgcgtcggggaagcgcaaggcccagcgggcatcgcaggcttgcgatatgtgtcggcagctcaaggcaaagtgtgacgagctcaagccgtgcaagagctgtaaggaaaagaaggttgagtgcaagtaccgggaggctgccccgaaacaacaagacaagatcaccgcagacatcctggatgctatcgtggcgttgcagaacaggttcgacaccttcgaccagcgcatgagcaggcttgagcgtgccatggtccgcaatgggacttcagtcgacgttccggccgagccgccgctggacgacgacgaacggcccgaatcggcggaatcggcggcgctcacggctgaggatgcaggatcatcatctccgggggacacggcaggaacgcaggccccgatcaacagccaagaggcgaggaccatcacgcgcagcatggaggaagagaaagaggtagagcccggcccggccgtgcggccgggcgccccgtccatcccgctaaaccacaccactcttgcggccttcctgctcaagtggaggcccatttcggtcctcgtccgggatatattggaagctgagaacgtaaagtacgtggacgagttcccgatccgccaggaagagaagcgtggtcttctccgagtctggggccgtggcgagggcttggagagcagcctccgagtcgacaaggtcgatagggaatccttgcgcgacgtgggcgtcgtggagatggtggcggacgacctttcggataccggcgcgccctcgccgggcgactgctggggcggtatcagcagttcgcctgctcccgttgacggcaaaccttccatctcgttaccgacgccagatttcagcgaggcgctggtgtggaagtacgtcaagagcttccaggataacatccagaacatgcatccgctcattatcccccgcgagctgaacgccatggtcaagctgtttctggacacggtccaacagaccatgggcaaacagccccggggaaccaccatcgccaagtttgccaccacgccgtcgacccagtccgagactgggtccaagagaaagcggtcccctggtccggacgccgccgagccgtcctcagcgtcacccaagtcgtccaggcccgtctttcaacgctccataaacaacgccctcgtcttgttggttctcgcactgggcaagatctgcctgcacaaggacaagatccctgacgtagtcccggtgagcgagcctcccgcgcatggctcgcccatggcacggaacggctacccggcttccccgatccagggttcgtcgccctcccaagcctcccactctcactcctcggccggccttccttctcccaaggacggcgccgagcgcccggggcccagcaggcgggcgtcgtttcagggaggcggagcatccatcaaggggggaacatctccaaagaggaacatggatgtcattcctggcctggactacttcgcctacgcaactgacatcctcggcggtcaattggccgggactagtctgcgccatatctacgcctttctcctggccgggctctatcagggacagttaggaagggttttggagagctacgcttacatcaaggaagccggctttgccttgcagatgaaactgaggccgagcctggatcgattccggaggttgaacgagatgggccgccaaggtgcggtaagcgacaagtctgataaccagctcgtttttgccttctggacctgtctgcaacttgaaagcgacattatcgccgagcttcccctcccgcaatcgcacatcttggcctacgaggacataatgccgtatccgaacattgaggtggccaaaaagctaggattcgatgagcacgtgcttcagagttatttggcccagttatacctgcgcaagactctgaatcagatccacggaatgctctacaatccggagaaaccgctgccgctagacgtcacgtcgggcgcggccaacatcatcgaatatatccaggagacgatgcacctgagtttcgtgccgcccgagttcatgtttgagcctaccgacccgccggccagcgatatcctgtcagctcggctccgcgccaagtactggggcgcgcaggtcatcacgtaccggccgtttgttaggcagatcctcgagttcaacttccaaaagatggccaacgacaccccgttgcctgcgtccgacttccgctccggcgttgtggtgcccgtcattggccccgacaatgacatccctccgcagatgatcgagtacgcggtcaagggtgtcggggccctgattgagagcacccgggcgttccatggactcaaggagaagcggttcattgtgaccaacatctttggaaccgctcatgcccaatggggcaacctcctcaccctcgcggccgcgttccgagatccgatattgagtaattatatcgacgagcgactcctcaaggagctcttcgccaaaaccatctcctttttcaagatcattgcacccccaacaagcgccttgcacatcgacctacggatactggaaggcctccagcgcaagctctggggaaagtctagcagcaccgaggcggtagaccatccgaccggatcaagcttttccagctcggcgagcggcgggccaccgcctgtccagcccatggctccagcgcctccgatgccgcccgttgccggcccgactggcgttcgctcctctccgggagaccacgtcggcaacggaatgacgagtatgtctccgccactgccgtcgcccctcccggcaacgatgcctgggtcggcgaccccagtacccgtgtcacctcttgaaccaagccaggggccatatcccggcggcatgctacctcccatgcaacaccaaccttcccatcattga

SEQ ID NO: 5035 - protein, 1010 aa, Myceliophthora thermophilia
MTPPYGDDRRHVSFDNSPQPPVYSRQPSYQPQTPLPHPQPYDYPPQYASHGELPYPIQVAAASGKRKAQRASQACDMCRQLKAKCDELKPCKSCKEKKVECKYREAAPKQQDKITADILDAIVALQNRFDTFDQRMSRLERAMVRNGTSVDVPAEPPLDDDERPESAESAALTAEDAGSSSPGDTAGTQAPINSQEARTITRSMEEEKEVEPGPAVRPGAPSIPLNHTTLAAFLLKWRPISVLVRDILEAENVKYVDEFPIRQEEKRGLLRVWGRGEGLESSLRVDKVDRESLRDVGVVEMVADDLSDTGAPSPGDCWGGISSSPAPVDGKPSISLPTPDFSEALVWKYVKSFQDNIQNMHPLIIPRELNAMVKLFLDTVQQTMGKQPRGTTIAKFATTPSTQSETGSKRKRSPGPDAAEPSSASPKSSRPVFQRSINNALVLLVLALGKICLHKDKIPDVVPVSEPPAHGSPMARNGYPASPIQGSSPSQASHSHSSAGLPSPKDGAERPGPSRRASFQGGGASIKGGTSPKRNMDVIPGLDYFAYATDILGGQLAGTSLRHIYAFLLAGLYQGQLGRVLESYAYIKEAGFALQMKLRPSLDRFRRLNEMGRQGAVSDKSDNQLVFAFWTCLQLESDIIAELPLPQSHILAYEDIMPYPNIEVAKKLGFDEHVLQSYLAQLYLRKTLNQIHGMLYNPEKPLPLDVTSGAANIIEYIQETMHLSFVPPEFMFEPTDPPASDILSARLRAKYWGAQVITYRPFVRQILEFNFQKMANDTPLPASDFRSGVVVPVIGPDNDIPPQMIEYAVKGVGALIESTRAFHGLKEKRFIVTNIFGTAHAQWGNLLTLAAAFRDPILSNYIDERLLKELFAKTISFFKIIAPPTSALHIDLRILEGLQRKLWGKSSSTEAVDHPTGSSFSSSASGGPPPVQPMAPAPPMPPVAGPTGVRSSPGDHVGNGMTSMSPPLPSPLPATMPGSATPVPVSPLEPSQGPYPGGMLPPMQHQPSHH

SEQ ID NO: 5036 - DNA, 828 bp, Myceliophthora thermophilia
atggatccgaactcgtcctcgtcgcagcacggccagcatggccagcacggccagcacagccagcagacccggcagatgcccgtttacgacctcagcctgggcggtcactacggagccagcgcagcgatctctgcgcaaggcttcgcgccgtccgagctgtacacaggaacatgggcaaatgtgcaccaaggcctgacgggccactacaaggacgtccttacggcgtactggcagcacaccatcaaccacctcgagagtgatacgcacgactacaaaatgcaccaattgccgctcgcgcggatcaagaaggtcatgaaggcagaccccgaggtcaagatgatctctgcagaggccccaatcctgttcgccaagggctgcgacatcttcatcaccgagctcaccatgcgggcctggatccatgccgaggagaataagcgacgcactctccagcggagcgacatcgcctcggcgctggccaagtcggacatgtttgacttccttatcgacatcgtgccgcgcgaggaagcttcctcccacgccaagcggacgagcaaccaagcagcggccgccgcgcaaaacgctgccccgcagccgcagatccctggggtcggggccccgaaccacaccgggcagcatcccatggctgcaccggactacacccttggaggccacaacatgggcccccaagccgattaccgacagccccaaacgatgtatcccggtgaagtacagacgggagcgcccacgtatggtcagcctcaagcccagatgtacaacgtggatgacatgtacacgtacgggacgatgcctcctcagcaggtatgttga

SEQ ID NO: 5037 - protein, 275 aa, Myceliophthora thermophilia
MDPNSSSSQHGQHGQHGQHSQQTRQMPVYDLSLGGHYGASAAISAQGFAPSELYTGTWANVHQGLTGHYKDVLTAYWQHTINHLESDTHDYKMHQLPLARIKKVMKADPEVKMISAEAPILFAKGCDIFITELTMRAWIHAEENKRRTLQRSDIASALAKSDMFDFLIDIVPREEASSHAKRTSNQAAAAAQNAAPQPQIPGVGAPNHTGQHPMAAPDYTLGGHNMGPQADYRQPQTMYPGEVQTGAPTYGQPQAQMYNVDDMYTYGTMPPQQVC

SEQ ID NO: 5038 - DNA, 2778 bp, Myceliophthora thermophilia
atggcatcagcatcagtatctccgggcccgtcgtcgcattcgggtctcgagtctgagtttcctcagcacccggactcgacaggagagcttgatgaggccttttggacggccatcagcaaccccagctccggctcactcgggctcctctctagcccggcaggcagcttagggagctcgtgggccgtcttgggaaatgggcagatcgtggagatgcaaccatcgccggcggctctgccgtcgcccctgaacgccgacctcgaccggttgagcccctatccggcggccgtcgaccagagcaggagcggtgtgtacggcagcgtcaacatgttccaggggttggagaaccacgggctggacttcttgacccgtcccgaggcgccaacggagctcgcgtccgcgcagttcgacggcgaggtgtttgatcccgtgttcaaccacttctcttcgagcagcatccttgaagaacagcagcccgccgaggcggccggcttcgagaacccgcaggcggccgtcgacgtgccaccgtgggagcccgtccatctcgggcatggcagcggagatggcaacggggacggcagcgggatcggtcgcaccagcagcaacccaaaaccccccgtgtccgcccccgctcccgcccccgctcccgcccccgttcccgttcccgttcccacgaccgccgccaacgaagcgtccccgatcttcatcatcgaggacccgggcttcacgtcgcaatctccatcccacacctactccccctccctccactccgcctcggccagcccgcccggcagcgccagcccgcagtccccggccgcgccgatccagttcgaacagggcctcccccccgccgaccgtctcaggcggcctcggacgacgtcgtcgacatcggcatccagcgctccgaaagcgatcccggcgccccgcaagctcaacgccggcaaccgggtgcagaagcgcaggagccagccgtccacggccttgcactcctcccccccgacgacgacgacgacgacgaccacctccacctctccctcacacacttccccacgctcgatatcatcatcatcatcgtcatcgtcatcgtcatcgtcattggcatcggcatcggcatcggcatcggcatcggcatcggcatcggcatcggcagccacggcggcgtccaagttcctcatcgtcacgccgtcgtccatcacgctcaactcggcggcgcagcccaacgtgaacccgttcgactgcctggacgcgctctcgcgggggccgacgcagcgggggcgcaagggcccgctggcgagcgacacgaaacagtcggcgctggtggtgcggcggatgggcgcctgcttcagctgccacgcgcgcaaggtgcggtgcgacaaggagcggccgtgccggagctgcgtgcggctggccggcagcgtgccgcaggtcgtgtgctggcagtttgccgacttcaccgccgtcctgttcccgggcttcctgcgcgcccacctcaagcgcgacgaggtcgcccgcttcgtcgacggctgcgtcgcctccttctccgtcgccggcgccgaggtcccctgcaccgtcgagctcgtctccggcgccggcttcggccgccgcaccgtcctcgagctccgcgccaagttcttcaccgcccgctccgccgacgcgctgcagcactggcacgccaccgtcggcaggaacggcatggacctcttctcgcgcggggcggcgcccatcgcgctcgaggtccccaaggaaggtgggggggccggtactactactacaattactaatactactactactactggtactggtactggtactggtactggtactggtactactactactagtagtagtacgaccacaaccacggccggggacgggcagagggcggagctcaagcggcggctgcgcgagtacatccaggcgatggtggacgagccgcggttcgcggagctggtgacgccggagccgcagcacacggagctgccgcgccgggtgctcgggatcgtgcacgagtacgcgggccggagcgacgtgccgatggtgcggcgggcgctgtccatctacgccatgcacttcgtcatgacgcggcacctctgcctgtcgcccaagagcgtggccgagctggggccgaccgggctggtgccccagggggtcccctgggtgacgccgcgggtgctgaaccggcaggtcaaggcggtcgtggacgagatgatgtgccgcgagatgcagctgctcttcgagaacttcggcaagtcgctcaagcccaagctgcgccgcgagtgggccccctgcctggcctccttcctggtcctctgcctcttcatggagtcggtcgagacggccgccgacctgttcgtcgtcacggacaacgagatcaacctgcgccaccactactcgcccgcctggaagcgctccttcgtcctcggcgtcaaccgcgagatcgagaacatgccgttcaagcagttcgccttccagttccaccagatctaccagacccactcgcgcgacgccgcctcccgcagcttcaaccccctcgtcgacgacgcctgcttcgacctgggcgagctcgaccaggacgccgccgacatggtgcgccagttgaggcgcttcatccatgatgattggtctgagctggactatttgacggcagacccgatcctgcccaacatcgaggaccatccttatccccgcaacgtggcctacaactacaccggccggctggttgccaagttcctactctccttcaccgacgagaagtacatctttgacgggaggacgtaa

SEQ ID NO: 5039 - protein, 925 aa, Myceliophthora thermophilia
MASASVSPGPSSHSGLESEFPQHPDSTGELDEAFWTAISNPSSGSLGLLSSPAGSLGSSWAVLGNGQIVEMQPSPAALPSPLNADLDRLSPYPAAVDQSRSGVYGSVNMFQGLENHGLDFLTRPEAPTELASAQFDGEVFDPVFNHFSSSSILEEQQPAEAAGFENPQAAVDVPPWEPVHLGHGSGDGNGDGSGIGRTSSNPKPPVSAPAPAPAPAPVPVPVPTTAANEASPIFIIEDPGFTSQSPSHTYSPSLHSASASPPGSASPQSPAAPIQFEQGLPPADRLRRPRTTSSTSASSAPKAIPAPRKLNAGNRVQKRRSQPSTALHSSPPTTTTTTTTSTSPSHTSPRSISSSSSSSSSSSSLASASASASASASASASAATAASKFLIVTPSSITLNSAAQPNVNPFDCLDALSRGPTQRGRKGPLASDTKQSALVVRRMGACFSCHARKVRCDKERPCRSCVRLAGSVPQVVCWQFADFTAVLFPGFLRAHLKRDEVARFVDGCVASFSVAGAEVPCTVELVSGAGFGRRTVLELRAKFFTARSADALQHWHATVGRNGMDLFSRGAAPIALEVPKEGGGAGTTTTITNTTTTTGTGTGTGTGTGTTTTSSSTTTTTAGDGQRAELKRRLREYIQAMVDEPRFAELVTPEPQHTELPRRVLGIVHEYAGRSDVPMVRRALSIYAMHFVMTRHLCLSPKSVAELGPTGLVPQGVPWVTPRVLNRQVKAVVDEMMCREMQLLFENFGKSLKPKLRREWAPCLASFLVLCLFMESVETAADLFVVTDNEINLRHHYSPAWKRSFVLGVNREIENMPFKQFAFQFHQIYQTHSRDAASRSFNPLVDDACFDLGELDQDAADMVRQLRRFIHDDWSELDYLTADPILPNIEDHPYPRNVAYNYTGRLVAKFLLSFTDEKYIFDGRT

SEQ ID NO: 5040 - DNA, 267 bp, Myceliophthora thermophilia
atggactcggacacagtcaagaaaaccatcatcaggcaggcgcttcaggcgaccaacacggccaatgcgcggaccctgatcgagaatatcaacgagaagtgcttcgagcgctgcgttcccaagccgggcagttctctctccagcggcgagcagacgtgcctgacgtcgtgcatggagaagtacatggcggcgtggaacgaggtcaatgcgacatacatccgaaggatacagcaagagatgggcaaccagaacatttccaacgcatag

SEQ ID NO: 5041 - protein, 88 aa, Myceliophthora thermophilia
MDSDTVKKTIIRQALQATNTANARTLIENINEKCFERCVPKPGSSLSSGEQTCLTSCMEKYMAAWNEVNATYIRRIQQEMGNQNISNA

SEQ ID NO: 5042 - DNA, 3543 bp, Myceliophthora thermophilia
atgagcccctccacgcaattcaaagcctcgaccatcatggtcaacacgaagacccccgctgccttcccgccgcccaagaccgacaaacctcgacctcacgtctgcggtacttgccagcgttcttttgctcggctggaacacctgaagcgtcatgagcgatcccacacaaaggaaaaaccgttccagtgtccggagtgcgcccggtgctttgctcgccgtgacttgctcttacggcatcagcagaagctccaccaaaccacgacaccgtcatcccgcccgcgcaaccgtcgcgagagcgcgagcggggcgacaccgggtgccggccgggtccggaagaacagtgtcgcgggtcccagtgctgcctctggcgacaccgctgcctccatgaggcctcgggcaaacactatcagccatatcgacaatacagccatccagatgatggccgcggcaacatctccgatctcgaggatgccccctacccacagccgccaccctagcctgattgggctgccaacccatcacggtctagaggcctacggcatggcttcggctttggcccaccgtggagcgcctctcggcctgcccaagctcgagacacatggtataaacggcatggacttttccggcagtctcaggacagctccagcgatgccgttcggctccgagttcgatatggacggaagcttgttcttcggcggctcccctggctccaccatcaaccccaacgccctccactacaacgattctccgccttccatggccatggatcccctctcgcccttctcgcatgggcttcctgacacgtcgaccgcgagccagtcactggacgatttcgactgggtaacaggcttcgaccataccatgtcattcaacaacgggcccttggagaacgctgtagacggctcttcgccctccgcgctcagcaccacgagccagagcggtatcagcgacgtcatggtggacggctcgaaccaccacacggctacgacggcaacaagttcgatgtggcagacgtccataatgggcccgccgcagatgcccaatcccttctccctcgacgtcagcggttccgtcttcccagatctcctgaacggtgcacccgtgtcgccgcagccatcgtccgcaaagcccatgggtgaaggctacttctcaaccccttcaccctcgctcctctcgaacctgaatacgcagaacatgaaccaagcgctcaatttcggtgccggtccggagacgccgtcctcgatgaatggtagtaatcatcatggcaccttacccgtctcgacaatcactgattcaacaagaaatgccatcctaggtgccctgtcggcctcccaggcgtcccagtttggtacgcggagatactcgttcgccacgtcgactaatcccctcgccaccgcccgaacctcctcgaagaccgcaagcacaaccggcaccaccggcaccggcgccgccatcgccagcagcaccgatcagaccacctccctgccgactacacaagaactccagcgatacgtcggggcatatctgcgatacttccacccccacctgccttttctacacgtaccgacgctgacgttcgagatacctgcgcaattgttggctaacgggcgaaatagcgacattggcgggagcggttgtttacttctttctatggcggccatcggcgccttgtttgagttggagcaccaggcgtccatggagctgtttgggatggccaagaagatgatccagctgtatctcgacgagaggaggaaggcgaacgtaagaaaggcagaatcccttcgccgaactcccatgtcggaccacagttcacagcagcaggaccctcccatcgagactcccgtgtggttggttcaggctatgctcctgaatgtcgtgtacggtcataactgcggggacaagcggtctggagagattgcgtccacacatgcggccgcattagtaagtcttgcgcagggggcagagttgctgcggccagtccgagtcgaacctgtcgccaaggacgtcgagatgtcggatgctaacggcgctggctcttggagtggatccgggagggacccgtctgaagagcacgccgagtggctgcgctggaaggccgctgaggagcggaagcggacactctatgccgtcttcaccctgtccagccttcttgtcttggcgtataatcacacgccggccctgacgaactcggagatcttgctcgaccttccttgtgacgaagagttcttcgccgccgacagcgccgctgcgtttcaggccaagggcggaattgaggcggcaaactacaaccgcatgacgttccacgaagccctagggcagctgctgcgctccaacgagaaacagaacatgcggccgttcactgacccccaccagccctttggctcggcgttcaacgccagtgatctccccgagagcagcctgaagccgagcagctttggctgtctggtattgatcagtgcgctgcacaactacatctgggagacacgccaacggcatcataacaaggtctggaccaatgaggagaccgagaagatgcaccggcacattgagccggcgctccgggcgtggcacgccgcctgggcaagtaacccgcggcattccgcggaacgtccaaaccctcacggagcagggccgctttcggccgattgcatccctctattggatctggcctacgtccgcctctttgtcaacctctcgcgatctaaagagaagttctggcagcgcgattgggatggcatggccgaggagctggcgaaggggtctgagattgtccagcacgccgagaactcgcccgcctccaacgccgagtccgccaacacggatccctcgagtacgcctgggacggcttctcttacggtcgataccccgccaacacaaagctcttctcctgaattcggcgcctccaagttgccagtctcgggtaacgttaaccctgagcggacgcagcaggcgccccagtcatcccagacgcagacatccaataagcagtcgatatctcgccgagagaagcacttgcgaaaagcagccttcttcgcggctgagtctctttccgttcccgacaagcttggggtcacgtttgccaatctcactagccgcgagttgcctctacaggcgacgctctgcgcctttgattgtgtccaggtccttgctgagtgggttgccactttacaggaccgcgttgggccctatctgggcatactgggccgggacaaggtcgatctcacacaagtaccggcaatcatgttgcttgaagaagaggatgtcaggctacttgcaaagattgacgatatcatacgaggtgctgagatcaagatgagcatggacatgactcaagttggcagcaatgggggggtctcgagcgtcgacagcaaattccaggtggacgacaatgcgggatacgccacgaagctcttaagagtcacagcctacatgtttgacaaagctgctgtatggcctgtcacccgattgattacgtcctgcctcgagacccacgcgaaccacatgcgtgcccgcgcagaaaagtccgtcgtggcccaaatctga

SEQ ID NO: 5043 - protein, 1180 aa, Myceliophthora thermophilia
MSPSTQFKASTIMVNTKTPAAFPPPKTDKPRPHVCGTCQRSFARLEHLKRHERSHTKEKPFQCPECARCFARRDLLLRHQQKLHQTTTPSSRPRNRRESASGATPGAGRVRKNSVAGPSAASGDTAASMRPRANTISHIDNTAIQMMAAATSPISRMPPTHSRHPSLIGLPTHHGLEAYGMASALAHRGAPLGLPKLETHGINGMDFSGSLRTAPAMPFGSEFDMDGSLFFGGSPGSTINPNALHYNDSPPSMAMDPLSPFSHGLPDTSTASQSLDDFDWVTGFDHTMSFNNGPLENAVDGSSPSALSTTSQSGISDVMVDGSNHHTATTATSSMWQTSIMGPPQMPNPFSLDVSGSVFPDLLNGAPVSPQPSSAKPMGEGYFSTPSPSLLSNLNTQNMNQALNFGAGPETPSSMNGSNHHGTLPVSTITDSTRNAILGALSASQASQFGTRRYSFATSTNPLATARTSSKTASTTGTTGTGAAIASSTDQTTSLPTTQELQRYVGAYLRYFHPHLPFLHVPTLTFEIPAQLLANGRNSDIGGSGCLLLSMAAIGALFELEHQASMELFGMAKKMIQLYLDERRKANVRKAESLRRTPMSDHSSQQQDPPIETPVWLVQAMLLNVVYGHNCGDKRSGEIASTHAAALVSLAQGAELLRPVRVEPVAKDVEMSDANGAGSWSGSGRDPSEEHAEWLRWKAAEERKRTLYAVFTLSSLLVLAYNHTPALTNSEILLDLPCDEEFFAADSAAAFQAKGGIEAANYNRMTFHEALGQLLRSNEKQNMRPFTDPHQPFGSAFNASDLPESSLKPSSFGCLVLISALHNYIWETRQRHHNKVWTNEETEKMHRHIEPALRAWHAAWASNPRHSAERPNPHGAGPLSADCIPLLDLAYVRLFVNLSRSKEKFWQRDWDGMAEELAKGSEIVQHAENSPASNAESANTDPSSTPGTASLTVDTPPTQSSSPEFGASKLPVSGNVNPERTQQAPQSSQTQTSNKQSISRREKHLRKAAFFAAESLSVPDKLGVTFANLTSRELPLQATLCAFDCVQVLAEWVATLQDRVGPYLGILGRDKVDLTQVPAIMLLEEEDVRLLAKIDDIIRGAEIKMSMDMTQVGSNGGVSSVDSKFQVDDNAGYATKLLRVTAYMFDKAAVWPVTRLITSCLETHANHMRARAEKSVVAQI

SEQ ID NO: 5044 - DNA, 1848 bp, Myceliophthora thermophilia
atgctgacaaggaaaccaccgcgtccaggcgacagacagcgaccgcaatgtggaacatgtgccgacgccggtattgtctgcgagatcaacaacaaccgcctcgcaaggggccccaagaaaggcgacctaaaagcgctgcgcagccgcatcggcgaatcgctccccgcgacggcacccgatcctcacacagctacgccaatctcggatgggggatctccaacgcttgtctcaccaggtcacaactccacaatctgggacggcgaaatcaacgtgcaggttcctcccatgacccccacatccgattcgatgggcttttcaaccttcaagttcccgcccacaccgccatcgccacaacggggcacttttgttgacgacctaatgcgggcagacctcgaccagttgtactttgacagagtccacccaaatgttcccatcttcaaccagtcacggtactttgctcgggcgcggcagacccagcacggcgatggacccagctacatgctctgcctccagtacgcgatgtggacactttcgatggcgctttcgtctcaattcgagagctcccgagagatgctatacaatgagacgcgacaaatgctcgaggcactggacctaaccgatgacgatttgcaaccagtacgcatcgagcacgtccaggcgtggctactcgtggcctattacgagttggcccgtgcgagctatcgccgggcctcgatcagtgccgggcgggcgttccgcctcgtccaactcgcccgcctgcatgaggtggacaaccctgaaaatactgtcgagggggaagatgccgtggctagagaggaacgaaggaggacattctgggtggcctactgtctcgatcgccttggttgcctcaagagccggtgtccaccgacgctgactgaagaagtgatctgtacccgcctcccgtccccggagttggcttttcaaagcggccatccaatcccgggttgttttctgccagaagcgatcgcgtcaggcgaccacaacttcctctccccccttgcggaatctgccgtaaccgtcaccatctgcggtcgtgcgttatcacatagcaatgtctctggcgtcgaacgggcgtttggaaacccgtcgcttgatttttggatccggcacgaatgggtggacggcatcctgacgcgaacactcgactccttgtcattgaacgcacccgtcgtttcagccatagccgatcccatgatattcttcgccttcatggtggcccacgcaacaactatcctcatgtgccagatcacggaaacgtcgagaatggatgagcagtcgcacgccaaggttgccgaatatcgcttgcgtgccacgcggtctgcgcaggaaattgctaggatggccaaggcacacgagcatatcggatatttcaaggctcacatattcatgccgttagccgtctttttcggcgtgtcgcagctggcggcggaccgcaaaagacgactaaacggcgactatgcctttcaaagtcgcccgctcgagactgaaggcgagtcgacacttgacgacgacttccaagcttgtatggatgcgttgaggaaggtgcagagctttaatcatcttgcgcgggatcatttggcggtcctggagtctcaggagtttgttctcggagggagagctacaggcgtgctgaaggtactatttgagaacgaattacaagtttgggaatcagctattttggtgcataggtcatgcgcgcactacatctacaaccctttgctgtatggacttgttagattcgattgtgatttggtttctcttgttttcgctcaaagttgtgcctacctagctaggttaattattgcgcatgcaattcgaggtaattaa

SEQ ID NO: 5045 - protein, 615 aa, Myceliophthora thermophilia
MLTRKPPRPGDRQRPQCGTCADAGIVCEINNNRLARGPKKGDLKALRSRIGESLPATAPDPHTATPISDGGSPTLVSPGHNSTIWDGEINVQVPPMTPTSDSMGFSTFKFPPTPPSPQRGTFVDDLMRADLDQLYFDRVHPNVPIFNQSRYFARARQTQHGDGPSYMLCLQYAMWTLSMALSSQFESSREMLYNETRQMLEALDLTDDDLQPVRIEHVQAWLLVAYYELARASYRRASISAGRAFRLVQLARLHEVDNPENTVEGEDAVAREERRRTFWVAYCLDRLGCLKSRCPPTLTEEVICTRLPSPELAFQSGHPIPGCFLPEAIASGDHNFLSPLAESAVTVTICGRALSHSNVSGVERAFGNPSLDFWIRHEWVDGILTRTLDSLSLNAPVVSAIADPMIFFAFMVAHATTILMCQITETSRMDEQSHAKVAEYRLRATRSAQEIARMAKAHEHIGYFKAHIFMPLAVFFGVSQLAADRKRRLNGDYAFQSRPLETEGESTLDDDFQACMDALRKVQSFNHLARDHLAVLESQEFVLGGRATGVLKVLFENELQVWESAILVHRSCAHYIYNPLLYGLVRFDCDLVSLVFAQSCAYLARLIIAHAIRGN

SEQ ID NO: 5046 - DNA, 2514 bp, Myceliophthora thermophilia
atgtcctacgacttcaacgccactgggggggaagccgcactgttggaacagcttgtgtttgaccaccgcgaaagatactcgtatcctgctgtctcctcggctgccccttctcaggatctcgtctcgaccgcgctcgccaccaccaccaccatgtctcatccgaaccgccagagcttgagcccggtgacgagctggctgcccctcgacccggccagcaccatgagcgcgcccatgtccatgcactcgcccaactcggccagcggggtgccttcatcccccgacgaccagagcgccggttcgccggggcatcagagcagcaccatgtcgagccctcttcaacagtcgtctccgtatcagacggccgctcattcccagccggcagggctggtcccggactggtctcttccactgcaggcccagcagcaaccggctgccgatctctcgcagttcatccaggattcggctctcatgagcttcaacccgtacacgtccaatttccagcccgctcccgtggagtatctcccggcaaccactcaggccacgctcgacgctgggctccagctagagtcggcatttcccaccatgtcaccaatggatccgacctcgcgagtgatgcagtgggggggtgcaaactggcaggattttgatcagtcgctcaacttccagaccgatagtctcccgcgcgtaaggagcatcgggagccattccccgactggcacctttctcgaggttttgtcgctgggctcaagcagcgacaatggctggacgtcggtggacatgtatcctagctgcgacaccttcacgcactcgcagacgcagcatacccagaaccaggcgatcttcaacccgagccagaccctgcacctgaggacgaattcggactcgtctgacgcaaactcgctcgagttcggcagctacgaggagatcacttttccctactccccgttctcgccatgctctgacggcttcgtggacacggctaacaaccaccgcaactgcatgccgggggagcatcaccaccacgcgtcgacgtctccggaactcatcagccccactgccgccgtcgcaccgttgccaattaataacaaggccatctcggcttccaggcccgtggtcggcagcggctccagcggctctggttctacttctcctccggcaaggcggaactctgggacgaggaagagccccattgccaaggccacaaaacccgttattcggaggacgtcgacagggaagaaggatggcactggcgagaagaaggtgggcaggagacgagggcccctgctgccggagcagcgcaagcaggccagcgagatccggaagctcagggcttgtctccgctgcaagttcctcaagaagacgtgcgacaagggcgagccttgtgctggctgccagccttctcacgctcgtctgtggcaagtcccttgcacgcggatagacatcaaggacattggatactttatgaaggactggaaggccgactatgaacggcatctcggccgcggcatgtccgttttcaatgtgaagggctttgcgcagaaggagacgctcatgtggatcacgcatggctacggcttctgcctccccgtcatggtccgcgaggtctacgtggcggatgagagctgcttccagctggattgggtcgagtcgtccctgcaagatcaagaccccatcgatttcgagattcgcacggagcgtctagatgtcggccaggatggcatctccatggaagctttgaacgagtatatcgacaagcacgtcgacgagggctttgagcagttcatcgacgaccacttcgagggtactcctttcattaccgagatcttcaagacggcgtaccggttctacaccaaggagaggctacccgtcatccgcaaggccctcaagctcgtcgtggcctacaatctcaccctccacattaccatggttgagcagccgccaacggaagagccgatggaaggccagatcgacgacgaggactccaagtactacggcaaggtggtcgcccccgtcatgatcaacttccagatcaagtgcgccatggccgacatgtggcgtgagctacagaaggatatcctagaggagctgtcggctctctactcgagcgtctacagcggtgagcgtttgaagaactggccaactatcttcatgctcgcctccattctgctcgccgtctgggaggagattcagttcgactgccactaccgcgtccccgacccggtcgccgtcgaaaagttctgcaacgacatggagaccgtgcccgttggtgtcattgtcggcctcttccacgccatctcccagaagctgcccgcgttcaccgaatgggacactcggagacacggccaactgcttaacaacaaccctgcggtctgcgaagccatgaccgaagtgcggcaacacgtcctcaagcatgaggcatacctgaggacgcgttccgaaaccaagtttgaccgctacgacttcgactcattatcaaacaagctcctttcgaagctggtcatcaggtccaactag

SEQ ID NO: 5047 - protein, 837 aa, Myceliophthora thermophilia
MSYDFNATGGEAALLEQLVFDHRERYSYPAVSSAAPSQDLVSTALATTTTMSHPNRQSLSPVTSWLPLDPASTMSAPMSMHSPNSASGVPSSPDDQSAGSPGHQSSTMSSPLQQSSPYQTAAHSQPAGLVPDWSLPLQAQQQPAADLSQFIQDSALMSFNPYTSNFQPAPVEYLPATTQATLDAGLQLESAFPTMSPMDPTSRVMQWGGANWQDFDQSLNFQTDSLPRVRSIGSHSPTGTFLEVLSLGSSSDNGWTSVDMYPSCDTFTHSQTQHTQNQAIFNPSQTLHLRTNSDSSDANSLEFGSYEEITFPYSPFSPCSDGFVDTANNHRNCMPGEHHHHASTSPELISPTAAVAPLPINNKAISASRPVVGSGSSGSGSTSPPARRNSGTRKSPIAKATKPVIRRTSTGKKDGTGEKKVGRRRGPLLPEQRKQASEIRKLRACLRCKFLKKTCDKGEPCAGCQPSHARLWQVPCTRIDIKDIGYFMKDWKADYERHLGRGMSVFNVKGFAQKETLMWITHGYGFCLPVMVREVYVADESCFQLDWVESSLQDQDPIDFEIRTERLDVGQDGISMEALNEYIDKHVDEGFEQFIDDHFEGTPFITEIFKTAYRFYTKERLPVIRKALKLVVAYNLTLHITMVEQPPTEEPMEGQIDDEDSKYYGKVVAPVMINFQIKCAMADMWRELQKDILEELSALYSSVYSGERLKNWPTIFMLASILLAVWEEIQFDCHYRVPDPVAVEKFCNDMETVPVGVIVGLFHAISQKLPAFTEWDTRRHGQLLNNNPAVCEAMTEVRQHVLKHEAYLRTRSETKFDRYDFDSLSNKLLSKLVIRSN

SEQ ID NO: 5048 - DNA, 783 bp, Myceliophthora thermophilia
atgaccgaaacctgcaaggcgtgccacgatccactcataatatctctggacccggaagacttggacaatggcgagaatcagccgcaaaccgtccctgatgaccttctcctgccgtgcggctgccatttccactggcaatgccttctcgacgagtcatccacaatagttagcaccctctcctgcccctcttgcaacacctacctatcctccaacgccgccggcgcctcctcctcctcgtcctcctcggctccggccccggcggatcccgtcatcctgacccactacaccaacgagggcggcgtcgacccctccctcgacatctacccctccctagccgaagaggcctacctgaccgcccacccggaagcccgtcccgcgcgggccttccacacgctcgtgtccgaaggcgaggtgcagggcatggtggagctgctcgcggacgtggacgggaacgaggaggcgccgctctcggccgcccagctgctcgcctggcgagatccgctcaacggcgggcggagcgcgctgcacgtggctttggaggcgcggcaggaggaggcggtctggttgcttctctggctggggagcagggcgaggagagaggacttccccgaggcagtagtccaagttgcggccgcgaacgggttaccgaggcgactggagggggtggaggatggggaggatgtgaggtttgtgaaggatgagaggggaaggacagcgggagatgtttgcttggaactcggggagccctggacgaagttggttgagggaggcttgttcagttaa

SEQ ID NO: 5049 - protein, 260 aa, Myceliophthora thermophilia
MTETCKACHDPLIISLDPEDLDNGENQPQTVPDDLLLPCGCHFHWQCLLDESSTIVSTLSCPSCNTYLSSNAAGASSSSSSSAPAPADPVILTHYTNEGGVDPSLDIYPSLAEEAYLTAHPEARPARAFHTLVSEGEVQGMVELLADVDGNEEAPLSAAQLLAWRDPLNGGRSALHVALEARQEEAVWLLLWLGSRARREDFPEAVVQVAAANGLPRRLEGVEDGEDVRFVKDERGRTAGDVCLELGEPWTKLVEGGLFS

SEQ ID NO: 5050 - DNA, 2148 bp, Myceliophthora thermophilia
atgtcggacagccaaaagagcccaagtatcgaggatctgacgcctgaggaggcaagccgcatcatccattctcatcgcaaaaggaaagtcaagtgcgacaacaagagcccgtgtgagaattgcgtcaagagggagcatccgcagctgtgctcctacaagcccaacaggtcagctactaccgggaagagcgtctcgaccagctcggagcaccctacctctggcaggaagaggtcgcggtcgccggaccgacaagaatccagaagccaaagtaacgaagcgcgcgaggccatacgtgcttacgacccagacaacaccgaaacggcccggtatgtgggccagaacagcataccagccctcctacgagaacaaacctccgtcagcgagccccaggaggtcaacgggatccgccaagacatgcgctccctactcggcctggacaattcggctccctttccgcttatgtcgtcgcgccatctggaccggttgaccttggacatctcgtccgaacttccctccgaccgcgaggtcatgaagctcttccggacgtacaaggaaataccccagccattttggggcttcgtcatcgatatcgatgacctggagtcacgcttgatggtttaccttgaggagcgagcaaaaaatgccagatcttccatcaagtctacaaaacctgtatcggcctcctggttggccatactctttgcagtcctcgctgtcggctcccaataccatgactctccttaccacgtgcggacgagggactcgcaaaagtacatccagatatcgtttcactttctccggctggggaactttctgctaaggccgaacctggactcgatccaagcgctgctcatgacgagtttcgtgttactcaacgacatgaaggccgaggcatcttgggccttgctcggtctcacctgccgattggcacagtcacttgggttgcatagagcacaaccacttgatggacggcagaccccagacgccgccagaaaggagatggcaaggagaaaactatgctctccgatgacgaatatcccttgttgtccaataccaatgtcgccgaccgcgaacaccgaaggatgggcgtaccttgaagccatgttcaacctctgccagatcgtctcccaaaggttgaatcccgatgctatcgcaactgccacatacgaacaaattctcgataactgtgcagcagttgagaacattcgcagcaagttgtcgatccaattacgcagcaaggagacgtgcaagtccgccctagataggctccagcactttgccatccggctacacacttcgttcatgatatcggtctgctgccgaccggcgctgataagacgcgatagcaaccatcttgacgcgacgcagagaaaatttttggcagacaggtgcaaggccaatctgaccgagacggtgcgaatgttcctcgcaatgcaccagttgtccgtcataccgacccggtcttgggccttcacctaccatggcttatcctcggccgttctcctgggtatcttgggcgagacaaaagcagacccagaggtccgcgagctgcaaggagaccttatctcagccctctcagcgacggcggccaaggatcaaacatccccccagcctcacatccgcaagtcggatcttgacattgagctctctggcccgctgtctcgggctctggcggcgctcaagaacatctacgatcatgggtccgtggtagcccccccgatcaagcgggaaagcagtacttccggcccggcgtcaggcgcgcgcacgccgttgccgcaaatgcaggcacccggttttcccggcaacggtgcgctggcccaagaccctcgggctgtgccggccaccctggacccgcaccagaacgcggcgttggccatgacggaactacagcagcagagcggcggtgcagtggccgacttctccgccgggattcccttttcccagacgcctcctgtacccggtgcgcagcagcagctccctgatattgctgcctttgacccggccagctacatgtcgccaatggacttgtatgattccattttctgggaatcacctgacccgttcaataccggaatggacgcgatgaactttgactttctcgcccatccgcctcctgggcaaccaacccagcagcagttctatttttga

SEQ ID NO: 5051 - protein, 715 aa, Myceliophthora thermophilia
MSDSQKSPSIEDLTPEEASRIIHSHRKRKVKCDNKSPCENCVKREHPQLCSYKPNRSATTGKSVSTSSEHPTSGRKRSRSPDRQESRSQSNEAREAIRAYDPDNTETARYVGQNSIPALLREQTSVSEPQEVNGIRQDMRSLLGLDNSAPFPLMSSRHLDRLTLDISSELPSDREVMKLFRTYKEIPQPFWGFVIDIDDLESRLMVYLEERAKNARSSIKSTKPVSASWLAILFAVLAVGSQYHDSPYHVRTRDSQKYIQISFHFLRLGNFLLRPNLDSIQALLMTSFVLLNDMKAEASWALLGLTCRLAQSLGLHRAQPLDGRQTPDAARKEMARRKLCSPMTNIPCCPIPMSPTANTEGWAYLEAMFNLCQIVSQRLNPDAIATATYEQILDNCAAVENIRSKLSIQLRSKETCKSALDRLQHFAIRLHTSFMISVCCRPALIRRDSNHLDATQRKFLADRCKANLTETVRMFLAMHQLSVIPTRSWAFTYHGLSSAVLLGILGETKADPEVRELQGDLISALSATAAKDQTSPQPHIRKSDLDIELSGPLSRALAALKNIYDHGSVVAPPIKRESSTSGPASGARTPLPQMQAPGFPGNGALAQDPRAVPATLDPHQNAALAMTELQQQSGGAVADFSAGIPFSQTPPVPGAQQQLPDIAAFDPASYMSPMDLYDSIFWESPDPFNTGMDAMNFDFLAHPPPGQPTQQQFYF

SEQ ID NO: 5052 - DNA, 3837 bp, Myceliophthora thermophilia
atggcaatgaacggagccgctgggactgccgccaccggcgatggcggtgaggccgtcctatcgaagatccacgaagcgctcaaagtagttcacagcccctactctccgaatcaagcccgacaggaggcccaagccttcctcgagaacgttaagagccttcccgagtcaccttcgcacggcttcagtctcgcgttcaacaaaccgcatgaacctatcgtccggcattacggcctgtcgctgctcgagcatgcagtcaagcaaaactgggaggaatatagcacggagcaccgagaatacctccgctcctgggttctgcagctggcggaaaccgtttccgccgaagatccgccctatctaaggaacaagattgcccagctgtgggttgaagtggccaagcgtgcttgggtcgccagctggatggacatggaccatcttttagtccgtatctggcggggctccgactcgccagtttataaacagttcgttcttcaaatcctcgagacactctccgacgaaatcttcaatggtgacgacgctgtggttgcccttcgtgaaggagtgctgagcaaggcatgcgtggagatttttacaccagcagcaatcctaaccgaggctttccctaatcgtcaagctggtccggacgtacggtgtgaggacgatggatggctcagtaggatcacacaactcatcggcgagtgcttgagcggtggcgtcgagcaaaccgaggatgtcactgcatgcgctgtcaaggcactcaaagttctcaactcggtggtgccatgggcgattcccaaagcattgaatgccgttggctgccgcgccgtcatgtgcagttgtctcgcaactccaagcgtgcccgtgcaaaaggttgggttcatccccggcaaggtcattcaagtactggttggactaactgatgaagagttcgtcgacctcgtagtgccaatgtacaccgagatcatggttgatctctataggcgactatttgagtggtcggtcgtagatccacaggatattgacgatgacaaataccagtttgcgaaaaagttctccgagttgctctgctccctgggcaactatctggacagaaagttcgcggctataccaccccagactaacgtccaaggatttctcgagctactcatgctggtggtgcaaagccagagccttgtcgtttcaattccagtccttctcacgtggacgcgcttgctgtctcatcggtctcttggtcccgcagctgccgagatgcccttgattgtcaacctcttggaggtgtgctgcgctcgcttgattcgatacgagagctttcccgaagattcggaagaccctgtttacgttttacttatcgaagataccgacactattcccgaacgacatgcttttctcggcaactaccgacggtattgctgctccattattgagagcatcgtccatctcaagatgtcagatgcattctcgcatatactgggcagggcggagcgtgctttgaatacgctgtatgatgggcagcctcccctaaatcctgctaactattctaaatcctcgttgcccgttttgacgtttgatgcccatgcaactgtgattgaggctgcgctcaaaggctacgacaagtggagggcgtcacgcagccggaccaatgaggagaagcagcaagcaaccgcggtcgaggagtattttgagaaatggtgtggtcaactccttgaaatgaaatttgaggatcctctaatccgcaagcggatacttcagctcctggtgaccttctctaccagagcactggattctaatcctgcgtttatgctaagagtcctggagcatatcctgatgacatggccggctctgcaaccagaacacaggctctacaatgacgccatcagagatctccagactgaaagcatggttgagcttcaacggttggcatcaaaaatgccggacccactccttgacgtgtatgatcagctagaggcgaaggtccaggagatgatcgcgtcgggaaccctggacgaaaagcgccagatcgcataccaaagtttcttgttcatcatcgttcaccgggctacgcatattgacccggccgtacggctctcaaagctcactgcatttatcgaccctgttaaggaccagtggaaaaatgagtccttaaaagcggccctgggttcttacaacggtttctgcgagctgctaggtctagacaaagtgcaaaagtacctaactgagcgccgtgtgcacgagaacgccgactggggctctaccgatcttgacgctgaaggcctcgcactacaggctgaactggaacaccgacagtcggtcctcccgcttcgggtgaccaagtccttcttaacatactcggtggagcgaatagaaaaggactcggctccctaccaggcatcttgcactctctggcaggatggattccagctcatcctgccagagcttctcaaacttttaagctacgcccacgcatcccacaacccagccaactgggttttgctgccagcagaaatgcagccaacagtgggtcgcctcctgtccgaccgattctggcaagccggcatttcggaagggagcaaggatgatttctatgctagagtgcttgggaagaagaacactctggaagggctcgcgtcaactgtccgtggcacgattcggttcgtgcgcgagacgtgctacgccatcatttactgcatgacgcggttgaacacgcagttctacggcttccttgaactgccaggtcccttggcgaacgcgttgttcgcggattctgtctacctgtcatctcaccaggtcatcaaccttctcaccctggtcaggtttctagtcgacaactgtcctgcggaattacgggagcacttcgtcccccccatcttggcagcctgctttgaacagatggatgcgaagatcagctctgagtgggaaaagctcggacaacgagaagcagtacaagcggcaggagatgaattgaccgaggagatgaaggccgagagcatactgagacaactcacgtattccgccgtactaatggtcgctgacgtcctcgatccagccagagtcgcagccccgtcagcctctgaagaacagcccgtcgacgcagcctcgagcgcgaaatacccgccgctgcgaaagttttgcttgatgaacccgtccatcgctgttccgctgctggtcttctgcagccacgcgatccggatgcatgatggtagatcctgcggcgtggtgctgcgggtcttccgttccattattcccgaattcagcccttcggaagtcccgaggacaatgaaagattcaggccatacggagcccctcgaggattttccgatcccggaggagacggcaagagacatcagagagttcatctccacggaggtgctgaaggcggccatttcttccctgcacgacccctatttcgtggacttgcaacgggagttgggcgcgctcatcgcccaaattttggcttactatgcttccctgacgcccacacctcggaatatccttgtttccttgccaaatatcaaaccagaggatgttgaccgtacgattcagcaagtgtcccagaccgggatgcactctcgacagcaacgcgctctcgttctcgaactactagaggacttgaagggagtcagcatctctgagatgggtaagctgactaagagtttcggggcaagaccgggatcggcgcgcggcaacaagaagtctgcccggagcaagatggctcaagaattcatgacgccacaagcaggctcgggaggaggtggaaggaggacagatggggatggctcagcggcacgtaacaagactccagacttggaaggtatggcggggatgttcaacgaggccgagtag

SEQ ID NO: 5053 - protein, 1278 aa, Myceliophthora thermophilia
MAMNGAAGTAATGDGGEAVLSKIHEALKVVHSPYSPNQARQEAQAFLENVKSLPESPSHGFSLAFNKPHEPIVRHYGLSLLEHAVKQNWEEYSTEHREYLRSWVLQLAETVSAEDPPYLRNKIAQLWVEVAKRAWVASWMDMDHLLVRIWRGSDSPVYKQFVLQILETLSDEIFNGDDAVVALREGVLSKACVEIFTPAAILTEAFPNRQAGPDVRCEDDGWLSRITQLIGECLSGGVEQTEDVTACAVKALKVLNSVVPWAIPKALNAVGCRAVMCSCLATPSVPVQKVGFIPGKVIQVLVGLTDEEFVDLVVPMYTEIMVDLYRRLFEWSVVDPQDIDDDKYQFAKKFSELLCSLGNYLDRKFAAIPPQTNVQGFLELLMLVVQSQSLVVSIPVLLTWTRLLSHRSLGPAAAEMPLIVNLLEVCCARLIRYESFPEDSEDPVYVLLIEDTDTIPERHAFLGNYRRYCCSIIESIVHLKMSDAFSHILGRAERALNTLYDGQPPLNPANYSKSSLPVLTFDAHATVIEAALKGYDKWRASRSRTNEEKQQATAVEEYFEKWCGQLLEMKFEDPLIRKRILQLLVTFSTRALDSNPAFMLRVLEHILMTWPALQPEHRLYNDAIRDLQTESMVELQRLASKMPDPLLDVYDQLEAKVQEMIASGTLDEKRQIAYQSFLFIIVHRATHIDPAVRLSKLTAFIDPVKDQWKNESLKAALGSYNGFCELLGLDKVQKYLTERRVHENADWGSTDLDAEGLALQAELEHRQSVLPLRVTKSFLTYSVERIEKDSAPYQASCTLWQDGFQLILPELLKLLSYAHASHNPANWVLLPAEMQPTVGRLLSDRFWQAGISEGSKDDFYARVLGKKNTLEGLASTVRGTIRFVRETCYAIIYCMTRLNTQFYGFLELPGPLANALFADSVYLSSHQVINLLTLVRFLVDNCPAELREHFVPPILAACFEQMDAKISSEWEKLGQREAVQAAGDELTEEMKAESILRQLTYSAVLMVADVLDPARVAAPSASEEQPVDAASSAKYPPLRKFCLMNPSIAVPLLVFCSHAIRMHDGRSCGVVLRVFRSIIPEFSPSEVPRTMKDSGHTEPLEDFPIPEETARDIREFISTEVLKAAISSLHDPYFVDLQRELGALIAQILAYYASLTPTPRNILVSLPNIKPEDVDRTIQQVSQTGMHSRQQRALVLELLEDLKGVSISEMGKLTKSFGARPGSARGNKKSARSKMAQEFMTPQAGSGGGGRRTDGDGSAARNKTPDLEGMAGMFNEAE

SEQ ID NO: 5054 - DNA, 3102 bp, Myceliophthora thermophilia
atgaacaacgatttctacacctctccgctgtcatccgaggaagaggcccagcagcggctggcgatgcagcggaacgggcaacaaggccagagccatggggcggccaacacgggaagtatgggaggggtggcccacacgagccctatgtcgaccgtggaaggcatggcgctgaccggcgaatcgctcgatgacatcttcagccagaatgaccgcaggttccagcggagaccgagtgtcgcccagccgttctcgggctcgctgacggctcgggaagtcggccatcacatgtcgatgatgggctttagcaacgccggtgacgccatgcaggggtttccccttggcctccccaacagcaccgacttgtcaggcacatccgggcagttttcacagcaggccctcatgggagtgccgggtcaaccgggatttgatgcgctggccccaaccacgctcagcatggacgcattcacgaacctaaacatggattcgatgggtgcggatgccgctgcaatgggcatcttcaactcacccgatctcaacgctcagtatccgtccgcgtcgctagacgctgtcaaccaagaccttcccatgggcatgggtgtcgacggcacggcaatgagcgcagccggtgtgaaccagatggctggatacggagccgggagaggcggcggcatgatgggaaccggtgaggcttttgacgcctcctctgccgttcctcgggagacctccaacagcatgatcatgtcagatcagaccatgggccagttccaagcgaacatagcgcccacggaacggcgcgaggcgtccgcctcctctacagcgttccaatcaccggcaccagaggcttctcggaccatgtcccagtctagcgcctgtcgatccagcgtcgccgcctcggcgaccccggccccggctgcgcctaccgccacgggcccacctctccctcccggtctcggggcgcgcaaccccaaaaaggacgtctattccaagagcggattcgacatgctccgggccctgttctacgtcgcgacaaggaagaatcccacggtggagattggtgccgtcgacctatcgtgcgccttcctcgtgaccgacgtgacgctcaacgactgccccatcatctatgtttcggacaatttccagaatcttaccgggtataaccgccacgagatcatcggcaagaactgccgttttctgcagagcccggatggagaggtggaggctggctcgcggcgcgagttcgtggcgaacgatgccgtcctcaaactgaagaacgccgtgaccgagggcaaggagatacagcagagcctgatcaactaccgcaagggcggaaaaccgttcctgaatctgctgaccttgatcccgatcccttgggatagtgatgagatcaagtacttcatcggtttccagatcgacctggtcgaatgccccgaggccatctcgggccaggaatccggggccatgcaggtcaactaccgacacagcgacattggccaatacttctggtcgctcccaaacacaacccagtgggagctcgaggccggtcagaccctcggcgtcgacgacgtctcctccctcctccagcagtacaatcccaagggtgcccccgctgagtggcataagcaatcctggcacaagatgctcctcgagaacgccgacgacgtgatccacgtcctgtccctcaagggcctcttcctctacctctctccggcatgcaagaagatactcgaatacgacccgtccgacctggtcggcacttccctatcgtccatctgccatccctccgacattgtccccgtcacacgcgagctcaaggacgcgcagcaaaacgcatccgtcaacatcgccttccgcatccgacgcaagcactcgggctacatgtggttcgagagtcgcggcacggttctgtacgagccgcacgccaagggccgcaagtacatcatcttggttggccgcaagcggcccatctactcgctgcgccgccgcgacgtcgacgcggcgcactccccgctcggcagcatgccgctcggcgccgacggcgagatctggtccaaggtctcggcctcgggcatgttcttgtacgtctcgtccagcgccaagtcgctgctcgacatcagcccccgggagctcgagggcaccagcatgcgggacctcctgcgcaaggagagcagggccgagttcgggcggacgattgagaaggcgcgcaagggcgcggtggtcgggctcaaacacgagctgatgcacaggaggggtcagctgatcgccgcccagacagtcttttaccccggcgacgggatgggagtcgcggcaaagggcgggcccagtttcctgattgcgcagacgaggctcgtcaagggcggccgggtcatcgctgccgggaagggagcaggcgggacggtgacgggagctgggactaccgctgctgctgctgctgctgctgctgctgctgttgctggtggtggcggcggcggagaggatgccacgacgggcgtcgtcgttgtggggaaccggtcggtgacggtcacgtacccgcgctcggcgatcgagtcggatgatgacgagagcgatgatatctttgccgagctcgggaccaccagatgcacgtcgtggcagtatgagctcaggcagatggaaaaggtcaaccggctgctggcggaggagctcatgcagctgatggccaacaagaagaagcggaagcggagaaaaggcggcgggagcggtgctggcgcgggggggagcggcggtgtggtggcgaaagattgtgcaaactgtcacaggacagatacgcccgagtggaggagggggcccagcgggaatagggatttgtgcaattcctgtgggttgcggtgggctaaacagacgggtaaggtctcgccgagaaatacctcccgcagaaacagcgatgccagcgctgccagtaagaggacgagcgtcagcacggtaagctcgaactcgccggctggggcgtcgccgctgaggagggaggtagcgagtgatgccgtcagctctgggtcgtcggcaatggagagggctagcattggggagtgcagtggcgtcggtggcggcgggagtgggatggggatgggtcctatccgagaggagtaa

SEQ ID NO: 5055 - protein, 1033 aa, Myceliophthora thermophilia
MNNDFYTSPLSSEEEAQQRLAMQRNGQQGQSHGAANTGSMGGVAHTSPMSTVEGMALTGESLDDIFSQNDRRFQRRPSVAQPFSGSLTAREVGHHMSMMGFSNAGDAMQGFPLGLPNSTDLSGTSGQFSQQALMGVPGQPGFDALAPTTLSMDAFTNLNMDSMGADAAAMGIFNSPDLNAQYPSASLDAVNQDLPMGMGVDGTAMSAAGVNQMAGYGAGRGGGMMGTGEAFDASSAVPRETSNSMIMSDQTMGQFQANIAPTERREASASSTAFQSPAPEASRTMSQSSACRSSVAASATPAPAAPTATGPPLPPGLGARNPKKDVYSKSGFDMLRALFYVATRKNPTVEIGAVDLSCAFLVTDVTLNDCPIIYVSDNFQNLTGYNRHEIIGKNCRFLQSPDGEVEAGSRREFVANDAVLKLKNAVTEGKEIQQSLINYRKGGKPFLNLLTLIPIPWDSDEIKYFIGFQIDLVECPEAISGQESGAMQVNYRHSDIGQYFWSLPNTTQWELEAGQTLGVDDVSSLLQQYNPKGAPAEWHKQSWHKMLLENADDVIHVLSLKGLFLYLSPACKKILEYDPSDLVGTSLSSICHPSDIVPVTRELKDAQQNASVNIAFRIRRKHSGYMWFESRGTVLYEPHAKGRKYIILVGRKRPIYSLRRRDVDAAHSPLGSMPLGADGEIWSKVSASGMFLYVSSSAKSLLDISPRELEGTSMRDLLRKESRAEFGRTIEKARKGAVVGLKHELMHRRGQLIAAQTVFYPGDGMGVAAKGGPSFLIAQTRLVKGGRVIAAGKGAGGTVTGAGTTAAAAAAAAAAVAGGGGGGEDATTGVVVVGNRSVTVTYPRSAIESDDDESDDIFAELGTTRCTSWQYELRQMEKVNRLLAEELMQLMANKKKRKRRKGGGSGAGAGGSGGVVAKDCANCHRTDTPEWRRGPSGNRDLCNSCGLRWAKQTGKVSPRNTSRRNSDASAASKRTSVSTVSSNSPAGASPLRREVASDAVSSGSSAMERASIGECSGVGGGGSGMGMGPIREE

SEQ ID NO: 5056 - DNA, 2349 bp, Myceliophthora thermophilia
atggctcagttggtctccgacttcatcatcacgcccgttctcagacaagctcgccgtttctcgaccgggttcgccgccgatgatccccctgccattgacggccccgcgatacgacgccgcagagcacagtcgaccggatacgccggttcttccgggaccgcgatacgggaggctgacgagcacgggaggaggcttccaacgggaaaagccggggttggtttgcttgacgacgccgccgtaacaccccaccccagtcgacaagaccaaggccatgccgccgccgctgccgccgtttttcagagttcaggaagcgtaggaaccagcgatgagagtcccggggctgtgcaaggagtttctgagtccgctgctggatcaagccggcaacccgacggcaccgacactgcccaggcaaccacccaaactacatggtcatcactcccagagggcagtcgagccactccgctgcccgaggatgacggcatgggggagctccgacgcaggatccaggccatccagctgctcgatgttccccagaatgtcaaggcccagatgatgcatggcctgttcacggaaaagtacaccaagcgacagctgtcgcccaaagccccccatgctacgatgcgacccgtgtcccgggcgagcacgagcacgctagacaaccgagaatcagtggaacacggcgggccgctgcaagttctgaagaaatggaatcctcttggggacgggtccggcccactcaacctgccgttaactgaggaggacctcacccctacctacgcgccggtcaggcagcccgacgacagtgccgagtggtggtcagcggccgaggagcccggggaagaggagaagcgcctcggctgcgaacactatcgccgcaacgtcaagatgcagtgcgccacgtgcgaacggtggtacacctgccgccactgccacgacgccgtcgaggatcacgcccttccgcgtcaacaaaccaagcacatgctgtgcatgctctgtgggtgcgcgcaaaaggtctccgatacgtgcacaaagtgcggccggccggcggcctactactactgcggaatttgcaagctatggaacgacgatgccagcaagcccatctaccactgccccgactgcgggctgtgccgggtcggccaggggctgggcaaggacttcttccactgcaagaaatgcatggcctgcatctccatgtccgagaccaaccacaagtgcatcgaacgggccgtcgactcgaattgccccatctgcaacgagtacctcttcgactcgcccaagtcggtcaccttcatgcagtgcggtcacagcatccacctgctctgcctcgaggagctcaagaagacgtcgtaccggtgcccgctgtgcaacaagtcgtgcgtcaacatggagtatcgcttccgccagctcgacatgcatattctccagcagcccatgccgcccgagtacgccgacgcccgcgctgtcatctcgtgcaatgactgctccgccaagagccagaccgcctaccactggatcggcctcaagtgtgccgtgtgcagctcgtacaacaccacccagctgcagcttctcaacatgccgggcggcgatcaccggcatcagtctcccgaacagcagcagcagcagcagcaacagcagcagcaacagcaacagcaacagcaacagcaacaacaacaacaacaacctgtcgcgctcgacccggcagttctggcagaggagatccgccgacgcaacagagccgcccgccgggcgcaaaagcgacagcgcgggcaagcagggaacaagaacaacaacagcggcggcggcggcggcggcggtagcactaccaacaacggtatccctggtttttccctcctctcaacgtcgcctacctcgtactcgcgtgcctttttgaccaggctgctgaaccgcggcggcgggacatcttcggaggcagaacaggcatcggcgggtgacgaaaagactgcgtcgaaccttttacccgctgctgctgcggttgttcctgcatctggatccatatgcaactcgggaggtgaagacagaaaagcacaagaagatgttgacgatgtagatgacgaggatggggacgacgatgatgacgacgacgacgaggaggatgcggagatggatatgctcgacctgtttggcctgcacagtcgggactttgatcggatgacggggctcacgtcgtcggcagcgagcgccatcgggcttgacgatgatgatgacgaagaggaggagacttcggaagatgaggacgaggagggcctggaagaagaaggggaggacgacgatgaagacgacgaagacgacgacgaggatgatatcctgcttctcgggcacagatag

SEQ ID NO: 5057 - protein, 782 aa, Myceliophthora thermophilia
MAQLVSDFIITPVLRQARRFSTGFAADDPPAIDGPAIRRRRAQSTGYAGSSGTAIREADEHGRRLPTGKAGVGLLDDAAVTPHPSRQDQGHAAAAAAVFQSSGSVGTSDESPGAVQGVSESAAGSSRQPDGTDTAQATTQTTWSSLPEGSRATPLPEDDGMGELRRRIQAIQLLDVPQNVKAQMMHGLFTEKYTKRQLSPKAPHATMRPVSRASTSTLDNRESVEHGGPLQVLKKWNPLGDGSGPLNLPLTEEDLTPTYAPVRQPDDSAEWWSAAEEPGEEEKRLGCEHYRRNVKMQCATCERWYTCRHCHDAVEDHALPRQQTKHMLCMLCGCAQKVSDTCTKCGRPAAYYYCGICKLWNDDASKPIYHCPDCGLCRVGQGLGKDFFHCKKCMACISMSETNHKCIERAVDSNCPICNEYLFDSPKSVTFMQCGHSIHLLCLEELKKTSYRCPLCNKSCVNMEYRFRQLDMHILQQPMPPEYADARAVISCNDCSAKSQTAYHWIGLKCAVCSSYNTTQLQLLNMPGGDHRHQSPEQQQQQQQQQQQQQQQQQQQQQQQQPVALDPAVLAEEIRRRNRAARRAQKRQRGQAGNKNNNSGGGGGGGSTTNNGIPGFSLLSTSPTSYSRAFLTRLLNRGGGTSSEAEQASAGDEKTASNLLPAAAAVVPASGSICNSGGEDRKAQEDVDDVDDEDGDDDDDDDDEEDAEMDMLDLFGLHSRDFDRMTGLTSSAASAIGLDDDDDEEEETSEDEDEEGLEEEGEDDDEDDEDDDEDDILLLGHR

SEQ ID NO: 5058 - DNA, 1587 bp, Myceliophthora thermophilia
atgccgatcatcggtgccaaagaagagcatgtcgacccacgcctgacgcgcatagcgcaggccgacaagaaaccgtggtacaagaaaccgaacctccggttcctgtacctcatcctcgtccccacagggcttggtgtagaatggacttcgggcttcgactcgtccatgatgaacagcctacaggccgtccagtcatgggttgactatttcaacaaccccacttcaggccgactcggcctcctcaacgccatgtactccctgggcgcgctcatggcgattcccttcatccccacggtcagccatttcctcgggcggcggcggacgatcctgctcgcctcggtcatcatgtgcatgggcgcgggcctgcaggccggggcgcgcaactcggacatgttcctggcctctcgctgggtgctcgggttcggcatacccttcgccatcgtcaacgcctcgtcactgatcggcgaactgtcctacgccaaggagcggcccatcatgacctcgctgttcaacgcctcctggttcgtcggcgccatcgtcgcggccggcaccacctacggcacgtttcagatggagtcgacctggtcctggcgcctgcccagcctgctgcagctcgtccccagcttcttccagatcaccttcatgtactggtgccccgagtcgccgcgctggctgatctccaaggaccgtggggacgaggcgttcgccatcctgcaaaagtaccacagcgagggcgcggacggggacgagttcgtgcggctcgagtacgcgcagatccagtcgacgatcgcgctggagaaggaggcggcctccagtttcgtgtgggcggacgtggtgcgcgatccgcccatgcgcaggcggttcaccatcgccgccatcgtcggcttcttcacccagtggagcggcaacggcctgctgagcttctacatgaagcagatcctggcgttggtgaacatcacggacaaccggacggtgcaaaagatcatcctcagcaacacctgctggggcttcatcaatgccgtcccccttgcgctgatcgccccgcgcttccggaggcgggtcatgtttctgacgtgcacgatcggaacggcggtggtgtacaccgtgtggacgattgccagcgctcgggccgagattgacccctcggcggcgacggcgattccggtgttggtgtttatctttgtctactctccattttacaatctcggatggaacgctctggcttacacgtacatggtcgagattttccccttccggcaacgctccaaaggcatcgcggtcgaacagctgacggtacggtttgccgtcttcttcaacacatatgtcaaccccatcgcgctcaaaaacattggatggaaatactacattatatattgtgtctggatccttgtcgagatcgcgaccgtctacctcctgttcccggagacgcacaatcgcacgctcgaggagctcagcttcatatttgagggcaaagcggtccaggagaagatgcagcagaacgtcgacaaggtgctcgaggttgagctggatgccgtgaagaggcggtcgtccaaggatggcgtggcaaccgctgaagaacgggcttga

SEQ ID NO: 5059 - protein, 528 aa, Myceliophthora thermophilia
MPIIGAKEEHVDPRLTRIAQADKKPWYKKPNLRFLYLILVPTGLGVEWTSGFDSSMMNSLQAVQSWVDYFNNPTSGRLGLLNAMYSLGALMAIPFIPTVSHFLGRRRTILLASVIMCMGAGLQAGARNSDMFLASRWVLGFGIPFAIVNASSLIGELSYAKERPIMTSLFNASWFVGAIVAAGTTYGTFQMESTWSWRLPSLLQLVPSFFQITFMYWCPESPRWLISKDRGDEAFAILQKYHSEGADGDEFVRLEYAQIQSTIALEKEAASSFVWADVVRDPPMRRRFTIAAIVGFFTQWSGNGLLSFYMKQILALVNITDNRTVQKIILSNTCWGFINAVPLALIAPRFRRRVMFLTCTIGTAVVYTVWTIASARAEIDPSAATAIPVLVFIFVYSPFYNLGWNALAYTYMVEIFPFRQRSKGIAVEQLTVRFAVFFNTYVNPIALKNIGWKYYIIYCVWILVEIATVYLLFPETHNRTLEELSFIFEGKAVQEKMQQNVDKVLEVELDAVKRRSSKDGVATAEERA

SEQ ID NO: 5060 - DNA, 498 bp, Myceliophthora thermophilia
atgatggtaccaaagtggcgaatcgccatcggctgcgatgacgcgggtgtcaactacaagaacaagatcaaggccgacttcgaggccgacgaccgcgtggtatcggtgatagacgtcggcacggacgacaagaccgcctatccacacatcgccgccaaagcggccaagctggttgcgtctggcgaatgcgaccgagcgctcctgatctgcggcaccgggctcggcgtggccatctcggccaacaagatcaagggcatccgggcggtcactgcacatgacagcttctcggtggagcgggcggttctcagcaacaacgcgcaggtcctgtgcatgggggagagagtggtgggattggagctggcccggaggctagccaaggagtggctgggatatgtgttcgacgagagcagccccagcgcggccaaggtggcggccattcaccagtacgaggagggcgaaggggggttgtctggacacgaagaggtccgggcctgctga

SEQ ID NO: 5061 - protein, 165 aa, Myceliophthora thermophilia
MMVPKWRIAIGCDDAGVNYKNKIKADFEADDRVVSVIDVGTDDKTAYPHIAAKAAKLVASGECDRALLICGTGLGVAISANKIKGIRAVTAHDSFSVERAVLSNNAQVLCMGERVVGLELARRLAKEWLGYVFDESSPSAAKVAAIHQYEEGEGGLSGHEEVRAC

SEQ ID NO: 5062 - DNA, 2208 bp, Myceliophthora thermophilia
atgtccggcctggtacccgaatccgtgcagaaagtggcgcacgccgccctcggctcccgcgagggcgacaagctcaaggacctcgcccacgacaccaaggatacaaccaacaaggaccgcctgacaacggattatggcgtcaaacagggcacggccgatgactggctgaaggtggtcagcaaggacaagacaggccctatgctcctcgaggacccctttgcccgcgaaaggatcatgagattcgatcatgagagaatcccagagcgggtggttcacgcccggggatctggcgccttcggcaagttcagggtgtttgagagcgccgaagacctcaccttcgcccccgtcctgaccgacacgtcgcgcgagacccccgtctttgtccgcttctccaccgttgttgggagcagggggagtgccgacacggtgcgcgacgtccgcggctttgccgtcaagttctacaccgacgagggcaactgggacattgtcggcaacaacattcccgtcttcttcatccaggacgccatcaagttccccgacgtcatccacgccgtcaagcccgagccgcacaacgaggtgccccaggcccagacagcgcacaacaacttttgggacttcgagttcaaccacaccgagtctacacacatgtttatgtgggcgatgagcgaccgggccatccctcgctcattccgcatgatgcaaggcttcggcgtcaacaccttcacgctgatcaacgccaagggtgagcgccattttgtcaagttcacctggactccggagctcggcgtccactcgctcgtgtgggacgaggcgctcaagctcgccggccaggaccccgatttccaccgcaaggacttgtgggaggccatcgcgaacggcgtgtatcccaagtggaagttcggtatccaggcgatccccgaggcggacgagcacaagttcgactttgacattctcgacgctaccaaggtctggcccgaggatctggtgccgacccgctacatcggcgagatggagctgaaccgcaacccggacgagttcttcacccaggtcgagcagatcgccttctgtaccagccacatcgtccccggcatcggcttctcggacgaccccctgctccagggtcgcaacttcagctacttcgacacccagatctcgcgcctgggcatcaacttccaggagcttcccatcaaccggccgatctgcccagtcatgaacttcaaccgcgacggcgccctccgccacaccatcacccgcggcaccgtcaactactggcccaaccgcttcgaggtctgccctccggcgagcaaggaggagggcgcctacgtcgagtacgcgcaaaagatcgcgggcatcaaggcgcgtatgcgcagtgacaagttcaaggaccacttcagccaggcccagctcttctggaacagcatgtcggccgttgagaagcggcacatcatcaacgccttcgccttcgagctcgaccactgcgaggacccggtcgtctttgggcgcatggtccagcgcctcgccgacatcgacctcaacctcgccgagacggtggccgagctggtcggcggcgaggcgcccaagcagggccggcccaaccacggccgccgcgcccgggcgctcagccagaccgagttcccgggctccgctccgaccatcgcctcgcgccgcgtcgccatcctcatcgccgacggatacgaccacgtggcctactccgccgcctacgccgccctctcgtccgccctcgccgtgcccctcgtcgtcggcaccaagcgcagcaaggtgacggccgccaacggcagctcgacgcagccgcaccaccacctcgagggcttccgctccaccatggttgacgccgtcttcatccccggcggcgccaagttcggtcgaggccctcgccagaacggccgcgccctgcactggatccgcgaggcgtttggccacctcaagactatcggcgccaccggcgaggccgtagacctcgtccagggggccatcgccctgcccagcgtctcggtctcgagctcgggcgacgcgcacgagagctacggcatcgtcaccctcaaggacctccggcccgagagcctgaccgaggccgtcaccatcgccaagggctccgccgggttcatggagaagttcttttacggcatctcgcagcatcgctgctgggacagggagctggatggtctgaacactctggttgcgtattga

SEQ ID NO: 5063 - protein, 735 aa, Myceliophthora thermophilia
MSGLVPESVQKVAHAALGSREGDKLKDLAHDTKDTTNKDRLTTDYGVKQGTADDWLKVVSKDKTGPMLLEDPFARERIMRFDHERIPERVVHARGSGAFGKFRVFESAEDLTFAPVLTDTSRETPVFVRFSTVVGSRGSADTVRDVRGFAVKFYTDEGNWDIVGNNIPVFFIQDAIKFPDVIHAVKPEPHNEVPQAQTAHNNFWDFEFNHTESTHMFMWAMSDRAIPRSFRMMQGFGVNTFTLINAKGERHFVKFTWTPELGVHSLVWDEALKLAGQDPDFHRKDLWEAIANGVYPKWKFGIQAIPEADEHKFDFDILDATKVWPEDLVPTRYIGEMELNRNPDEFFTQVEQIAFCTSHIVPGIGFSDDPLLQGRNFSYFDTQISRLGINFQELPINRPICPVMNFNRDGALRHTITRGTVNYWPNRFEVCPPASKEEGAYVEYAQKIAGIKARMRSDKFKDHFSQAQLFWNSMSAVEKRHIINAFAFELDHCEDPVVFGRMVQRLADIDLNLAETVAELVGGEAPKQGRPNHGRRARALSQTEFPGSAPTIASRRVAILIADGYDHVAYSAAYAALSSALAVPLVVGTKRSKVTAANGSSTQPHHHLEGFRSTMVDAVFIPGGAKFGRGPRQNGRALHWIREAFGHLKTIGATGEAVDLVQGAIALPSVSVSSSGDAHESYGIVTLKDLRPESLTEAVTIAKGSAGFMEKFFYGISQHRCWDRELDGLNTLVAY

SEQ ID NO: 5064 - DNA, 1623 bp, Myceliophthora thermophilia
atgagcagtagcccgaccgacgacaccaaaccgcgcagcgatggcttcgaggtcgctgccgaggcgggccataccttcaccctggacgagaaagcgaaggtggccgactacaaggccgatgccgtcgcggcagagaatgcggagcacaacatgaccgtcttggaggccgttcgggcgtacccgatggcctccttctgggcgtttgtcatgtccttcaccatcattatggagtcgtacgacgtcttcctcatcggcaactttgtcgccctccctgcgtttatacgacaatacggcgagtacaacgcggagaagaacgtgaccgtcatcgtgccccattggcagtctgcgctccaggtgtccgggcagctcggcgcgctgatcggtgtcttcgtggccgggcccgtgaccagccgcatcggctaccgctgggcgaccatcaccgggctcatgctgctcaacgccttcatcttcaccttttactttgccgagtccatgcccgtcatctttttggcccagctcctcgagggcgtcccgtggggcatcttcatcgccaacgcgcccgcctactgcagcgagatcgtgcccatcaagctgcgggcccccgtcacccagatgctgcagatgttctgggccgtcggcagcattatcgtgggtgccgtcacctacgtgtacaaccaagtcgagcacgagcgggcctacaaaatccctatcgcactccaatggatgttccccaccccgctcgccatcctcatgttcatcgcacccgagtcgccttggtggctggtccggaagggccgcctcgaggaggccgccaagtcggtcgagcggctcggccggcggtccagactgaactcgggcgagacggtcgccatgatgcgccgcgtcgtcgagctcgaaaaggccgagggcgagcccagcttctgggagctctttcggggcaccgacacctaccgcaccctcattgtctgcggcgcctacgcctcgcagaacctgacgggcaatctgattgccaaccaggccgtctatttctttgagcaggccggcgtgtccacaaatacggctttcgccctcggcctcatcacttcggccctgcagatggtcttcgtcatgctgtcgtggatcctgaccacctacttcgggcggcggagcatctacctatggggtaccttcggcaacgtcgtcctgctcgtcgccctgggcatcgccggctccatcggcgaccccaaggcgacctccgcctctctggcccaggcctccctcggcctcatcatctcggtcctcttcaccttcggcgccgccccggcctcctgggtcatcatcggcgagacctcgtccatccgcctccggcccctcaccaccggcattggccgcgcctcttactacgtcgtcgagatcccctgcatcttcctcggaagctacatgctcaacccgacaggcggaaacctcggtggaaagtgcggctacgtctgggctgggactgggctgttctgcttgatcgtagccttcttctacttgcccgaaatgaagggccgctcgtaccgtgagatcgacatcttgttcaggcgcaaagtcccggctcgcaagtggaagaagacggttgtggatgccgaggatgacgagtag

SEQ ID NO: 5065 - protein, 540 aa, Myceliophthora thermophilia
MSSSPTDDTKPRSDGFEVAAEAGHTFTLDEKAKVADYKADAVAAENAEHNMTVLEAVRAYPMASFWAFVMSFTIIMESYDVFLIGNFVALPAFIRQYGEYNAEKNVTVIVPHWQSALQVSGQLGALIGVFVAGPVTSRIGYRWATITGLMLLNAFIFTFYFAESMPVIFLAQLLEGVPWGIFIANAPAYCSEIVPIKLRAPVTQMLQMFWAVGSIIVGAVTYVYNQVEHERAYKIPIALQWMFPTPLAILMFIAPESPWWLVRKGRLEEAAKSVERLGRRSRLNSGETVAMMRRVVELEKAEGEPSFWELFRGTDTYRTLIVCGAYASQNLTGNLIANQAVYFFEQAGVSTNTAFALGLITSALQMVFVMLSWILTTYFGRRSIYLWGTFGNVVLLVALGIAGSIGDPKATSASLAQASLGLIISVLFTFGAAPASWVIIGETSSIRLRPLTTGIGRASYYVVEIPCIFLGSYMLNPTGGNLGGKCGYVWAGTGLFCLIVAFFYLPEMKGRSYREIDILFRRKVPARKWKKTVVDAEDDE

SEQ ID NO: 5066 - DNA, 1617 bp, Myceliophthora thermophilia
atggagtccaagatcaggccggactcggtctcggccgagttcgaggtcgtccacgagacgccgcggttccagagggtatactggacgagggaaccgcatctccggaagctctacggcatggccgtcatcctcatggtggcctccgcgacgacagggtacgacagcatgctggtcaacacgtcgcagcagatcgatgcctggaaccgcttcttcttccccgagctccaggacgaccggaacgccggggaccccgcgctcaacagcaagctcgccatcctcgtcaacatgttcaacatcggctccatcgtctccttctttatcaccccatacgttgccgaccactttggccgccggaccgccatcatcgccggctgcaccttcatggtgacgggcggcttcctcacggcctttagcaacggctacggcatgtacatgggcggccgtttcgtgctcggcttcggcaactcacttgctcagatggcctcgccgctcctcctgaccgagatctgccacccgcagcaccgcgggccggtcacggccatctacaactgcctgtggaacgcgggcgcgctgctggtctcgtgcatcgcctggggcacggcgacggtgcggagcgagtggtcgtggcggtccatcacgctcatccaggtggtgccctcgctcatccagctcgccggcatctggtggatccccgagtcaccccgattcctcatcaacaaggagcgccaccgggaggccctccacatcctcaccaagtggcacgccggcggcgacccgcacaacgccacggtccagttcgagttccgcgagatccgcgagaccatccggatccagaaggagacggagcgctcgaccagctaccgcgacttcctgcgcacccgcggcaaccgctggcggctcgccatcatcgtctcgctcggcgtcatctcgcagtacagcggcaacgccctcttctccaactacatgaacgccatctacctcggcgccggcatcaccaaccagaaccagaagctggccatgtcgaccggcaagaccatcctggacctcatcgtcaccgtcaccgccgccctgggcgtcgaccgcttcggccgccggcccctcttcctcacctccatgctcggcatggtcctctccttcgcctgctggaccgtcaccggcgccgtgtacgagaagtcggccgagctcaacgtccgcgccggctacgcccagctcgtcttcatctggatctttggcatcttttacgacatcggcttctccggcctgctcgtcgcctacgccctcgaggtcctgcccttccacctgcgcgccaaaggcatgatgatcatgaacattaccgtccaggccgtcctcgccatctccaaccaaaccaacaagattgcgtgggagcggctgccgcaccactggaactttatgctcttctacaccctctgggacctcgtcgagctcctcttcgtctggttcttttacgtcgagaccaagggccccaccctcgaggagatcgcgcgcatcttcgacggcgacagcgccgtcgcccacatcgacatgcacgacgtccaaaaggacatctacgccatggaggaccgagatccctataacctgcccgggagggctctgtga

SEQ ID NO: 5067 - protein, 538 aa, Myceliophthora thermophilia
MESKIRPDSVSAEFEVVHETPRFQRVYWTREPHLRKLYGMAVILMVASATTGYDSMLVNTSQQIDAWNRFFFPELQDDRNAGDPALNSKLAILVNMFNIGSIVSFFITPYVADHFGRRTAIIAGCTFMVTGGFLTAFSNGYGMYMGGRFVLGFGNSLAQMASPLLLTEICHPQHRGPVTAIYNCLWNAGALLVSCIAWGTATVRSEWSWRSITLIQVVPSLIQLAGIWWIPESPRFLINKERHREALHILTKWHAGGDPHNATVQFEFREIRETIRIQKETERSTSYRDFLRTRGNRWRLAIIVSLGVISQYSGNALFSNYMNAIYLGAGITNQNQKLAMSTGKTILDLIVTVTAALGVDRFGRRPLFLTSMLGMVLSFACWTVTGAVYEKSAELNVRAGYAQLVFIWIFGIFYDIGFSGLLVAYALEVLPFHLRAKGMMIMNITVQAVLAISNQTNKIAWERLPHHWNFMLFYTLWDLVELLFVWFFYVETKGPTLEEIARIFDGDSAVAHIDMHDVQKDIYAMEDRDPYNLPGRAL

SEQ ID NO: 5068 - DNA, 465 bp, Myceliophthora thermophilia
atggtcaaggctgtcgctgtcgtccggggtgactccaaggtcaccggcaccgtcgtcttcgagcaggagtccgagtccgcccctaccaagattacctgggacatcagcggccatgatcccaacgccaagcgtggcttccacatccacaccttcggtgacaacaccaacgggtgcacctcggccggcccgcacttcaacccccacggcaagaaccacggcgccccgaccgacgagaaccgccacgtcggtgacctcggcaacattgagactgatgcccaaggcaactccaagggctctgtgacggacagtctcatcaagctgatcggccccgagagcgtcatcggccgcaccgtcgttgtccacgccggcaccgatgatctcggcaagggcggcaacgaggagtcgctcaagaccggcaacgccggcccgcgccctgcgtgcggcgtcatcggcatctcgcagtaa

SEQ ID NO: 5069 - protein, 154 aa, Myceliophthora thermophilia
MVKAVAVVRGDSKVTGTVVFEQESESAPTKITWDISGHDPNAKRGFHIHTFGDNTNGCTSAGPHFNPHGKNHGAPTDENRHVGDLGNIETDAQGNSKGSVTDSLIKLIGPESVIGRTVVVHAGTDDLGKGGNEESLKTGNAGPRPACGVIGISQ

SEQ ID NO: 5070 - DNA, 1662 bp, Myceliophthora thermophilia
atggccgatactaaaacaccaccaggttcggacgggcctcttccagacaaggagaccggcgcagttgctgctgctgcggctcctctggatggcgacatcgctatcgtggaggcaaagcatgcctcggagaaagagcaccaaatgtccctcctgaaggctctcaagctgtatcccaaggccatcggctggtcagtcctggtatcgtccaccatcatcatggaaggttacgaccttgccctgctcggcaacctgtatgcctccccggccttcaacaagaaattcggcgagtatgacgccgcctcggacaagtatgtagtctcggctgcctggcagtccggtctgtccaacggtgccagggcgggcgagatcttcggcctgatctttgccggttgggcctcggaccgcttcggctacaagatgaccaccattgggtcgttgatcctgatgatctgcttcatctttgtcctgttttttgcacccaatgtcaaagtgttggtggttggcgagattctgtgtggcgttccttggggtgcattccagagcgtaacggcagcttatgcctccgaggtggctcccatggtgcttcgtccctatctcaccaccttcatcaatatgtgttgggtcattggccaattctttgccgttgccgtcaacaaggggtcggtgggacggaacgacgactatgcctacaagattccgtttgccgtgcagtgggtatggcccgttcccattctcgctggtctcatcttcgcccccgagtccccttggtggtatgtgaggcacggccggaaagaggaagcaaggaggtccttgctgcgcttgacctcgcgaaaccagcccgacttcgaccttgacgagaccatagccatgattgagcacaccaacgagctggagaagaagctgaaggagggtgttcggttccgtgattgcttcaagggcgtcgatctccgccggaccgaaatcgtcgtcggcatctggcttgtccagacgcttggagggcaaaacctgatgggttactttgcatactttctcgtccaagccggcatggactcgagcaattccttcaccctctccctctgccaatacgccctcggcatgatcggcaccgccggctcctggttcctcatgtccagggtcggccgccggaaaatccattttggcggactgtgcgcccagctcaccctcctcatcatcgtgggctgcctttcctttggcacgacgaaggcgtccgtctgggccattggtgcgatgctgatcgtcttcacctttgtctacgacttcgccgtcggccccgtcacctactcgctcgtctcggagctctcctcgacccgcctcaaggccaagacgatcgtgctggcccgggccgcgtacaacgccagcaacatcttcgtcaacgtcatgaccaactatcagctgagctccaccgcctggaactggggggccaggaccgctttcttctgggccggttcttgcctgctgtcggccatctgggtcttcttccgcctgccggaacccaagggcaggacctacgccgagctggacctcttgtttgagcagcgggtgccggcaaggaagtttgccgagaccaagattgatccctttgcccacacagaggagaagaggagcttgtcgggcgagatgctggagcacgtagaaaaataa

SEQ ID NO: 5071 - protein, 553 aa, Myceliophthora thermophilia
MADTKTPPGSDGPLPDKETGAVAAAAAPLDGDIAIVEAKHASEKEHQMSLLKALKLYPKAIGWSVLVSSTIIMEGYDLALLGNLYASPAFNKKFGEYDAASDKYVVSAAWQSGLSNGARAGEIFGLIFAGWASDRFGYKMTTIGSLILMICFIFVLFFAPNVKVLVVGEILCGVPWGAFQSVTAAYASEVAPMVLRPYLTTFINMCWVIGQFFAVAVNKGSVGRNDDYAYKIPFAVQWVWPVPILAGLIFAPESPWWYVRHGRKEEARRSLLRLTSRNQPDFDLDETIAMIEHTNELEKKLKEGVRFRDCFKGVDLRRTEIVVGIWLVQTLGGQNLMGYFAYFLVQAGMDSSNSFTLSLCQYALGMIGTAGSWFLMSRVGRRKIHFGGLCAQLTLLIIVGCLSFGTTKASVWAIGAMLIVFTFVYDFAVGPVTYSLVSELSSTRLKAKTIVLARAAYNASNIFVNVMTNYQLSSTAWNWGARTAFFWAGSCLLSAIWVFFRLPEPKGRTYAELDLLFEQRVPARKFAETKIDPFAHTEEKRSLSGEMLEHVEK

SEQ ID NO: 5072 - DNA, 1833 bp, Myceliophthora thermophilia
atggctcagccctctccgccaaccacgaggccaaccacgaggccaaccagggccgctcccgccaacaatacacgcttcttcggctcccagataggcggccgctccgtcatcaactatggttataccgacatgccttggaagctcatggcttgggatgtctactacttcttcaagtactcttgggccattccttacattttgtggccgctctctcctgcagactcgggcgagctgagcgagctctcgccgacaaaggagaacatccgggctatcgcgattcaccttgtgttgtgcatactgcagcttggcggcctggtagcgctcccagctctggcggtgctgccgatttggacagccaccatcatcgtcggcgttttcttgttggtcaacaagcttctgtgcatgctgctcaacggcaaggaagtcgagtatcattcggaccccaagtacgcgccggcactgccagaacatgcccacgagcaatggattttcatcaacggggtggcggttgggtcacattggatgcagaccaatctcaaccgcctcgccgcctccttcaagcggccaatcctgggcatccacaatagaacctctggcatcttgttcgacgttgtcgagtgcctcatccagcgcaactggggatacgccaccaaggacgtacgggtctgttaccgtataatcaagaagaagctgtacaacccgcaatattccaaagtcatcttcattcttcactcgcagggcgccatcgagggcagcctgatcctggactggctcctccaggaactccctcaggacctgctttccaaactcgaagtctacacttttggcaacgcggccaaccactttaataacccgcaccgccacatccgtacccaaaacctggcaaagctcaacccgtcggcggcatgcgtcgactcggtccagctcacgcacaaccgcgaggaagccgcccgtgtcccccgccgccgttgcccgcagccgggatccaggcccaactctagttctagctccaactccagttccggctccagttccagttccagatccagctccagatccggcgccagatccagctctagctccacctccttcgatctcgatgacgcggccgattcgtccaaccgccactcgaccccgacgaccactgagacggagagcggtgccggcacggccacggccctcttcacggccgccgccggcagcagcccgcacccctcccaccacccggaccgcgccatcggctacatcgagcactacgcccacacgaccgacttcgtcgccgcctggggggtcctgcactttgccacctcgtcgccgtcctcccagttcgtcccgcgcttcatcggccgcgtgtttgcgcgcaccagcccccgcggcggccaccagatggtgcagcactacctggacggcatgttccccctccgaagggaccccgcgaccggggagctggcgaggaacgcggacggggtgcccctcggggtggaagaggaggggaacgagttcatggagagcgaggtccttgttggcggtggcggggacggcacgggcagggaggagggcgagggagaggaactgagcgacggtgaggcggcagatggagaggagcaggagcaggtcgaggtagtcgacgtgagtcccgagccggcgagggcggaaagcggcgacggggcggtctcgccgcggaagactaggaggaagcggcaagaaggggtgagggtcaaggtcaaggacgtgagccggctgtggcagtatcggaacggacgcagcccggaggagacgccccctctgcttgtcaggggcaaggacggagtggtgaggaacgcgacaatgtaa

SEQ ID NO: 5073 - protein, 610 aa, Myceliophthora thermophilia
MAQPSPPTTRPTTRPTRAAPANNTRFFGSQIGGRSVINYGYTDMPWKLMAWDVYYFFKYSWAIPYILWPLSPADSGELSELSPTKENIRAIAIHLVLCILQLGGLVALPALAVLPIWTATIIVGVFLLVNKLLCMLLNGKEVEYHSDPKYAPALPEHAHEQWIFINGVAVGSHWMQTNLNRLAASFKRPILGIHNRTSGILFDVVECLIQRNWGYATKDVRVCYRIIKKKLYNPQYSKVIFILHSQGAIEGSLILDWLLQELPQDLLSKLEVYTFGNAANHFNNPHRHIRTQNLAKLNPSAACVDSVQLTHNREEAARVPRRRCPQPGSRPNSSSSSNSSSGSSSSSRSSSRSGARSSSSSTSFDLDDAADSSNRHSTPTTTETESGAGTATALFTAAAGSSPHPSHHPDRAIGYIEHYAHTTDFVAAWGVLHFATSSPSSQFVPRFIGRVFARTSPRGGHQMVQHYLDGMFPLRRDPATGELARNADGVPLGVEEEGNEFMESEVLVGGGGDGTGREEGEGEELSDGEAADGEEQEQVEVVDVSPEPARAESGDGAVSPRKTRRKRQEGVRVKVKDVSRLWQYRNGRSPEETPPLLVRGKDGVVRNATM

SEQ ID NO: 5074 - DNA, 3231 bp, Myceliophthora thermophilia
atgtcaggccatgcgctaacttctgggggattaggccagcagcaggccagacccggcaaccactttagccgacagtccgactccgagtctgaagaacggctcccctcaaagtcgccatccgccgtcatatcctcggcctttcgcggcatcaaaaagatcacgccggcaagaccttccaagctctctctgcgccagccgtccgagtcagacgttcctgcactcgagtcttccctcagctccgcaactatcccccccggaagcacacgcccgccgcccccacaacatgcacgaagcttgagtctgcaggatagtcttgcgaagcccttgcccgaaccgccgccgccgcaactttcgccagcgagtcccttgacgcctttagccgtcccccagcagccgaggggtctggcaacgattctcgacaccgagacggaggaaaacgacgacagcagacccggcacgatggagtcggcctcatccatggagacaggtggcgggttgtacgcccgaggggaagccggccacggtcaggacgtgagcgtcaatagcagccagagcagcctggcgagctcgtctcggcatgacggacaagacgaccggaattatgataatctgacgccgaaaagcaccggcccgctttcggccggtcagtcgcccaataatagccagccgaggacacaggccggcggcacggccgtcgggaccgcaactccgtcggcgcacttgtcggggttgatgtgcaacgtacacaggacaacaggcagggagccgcatccccttgttggagccacgaccaccatcctgggtgacaagctgtatgtgtttggcgggaggatattgtcaagaagcagaccggcgcccttgacctcggatctgtacgagcttgacctgattcgccgtcattggacaaaggtggaaacgacgggcgatatccctcctccgcggtacttccactcgatgtgcgcgcttggggatacgaagctggtgtgctatggcggcatgtcgccgacaacgaaccagaaaaacataccgcaagaccagcaacccgaggtcacggtcatgtcagatatttacatctacgacgtcccgacgaggaaatggacattcattccgacacaagatgcccctcagggacgctacgcgcactgcgcatgcatcctcccttcatccgcaacgtttgtttcacaccgagcgcccctctcggcgcttcagcacaatccgtcgacaggcaaccccaacgagggccggatcggtatcaatattgacggggctggcggcgccgagatgatcgtagtcgggggtcaagacgcatcaaatcactacatcgagcagattagtgtcttcaacctgcgcagtctaaaatgggtctcgacgcaacccttgggtaagagctgtggcgcgtaccgcagcgtcgtagcaccgctccccccatccgtgaccgctaagctcggcaagtcgtttcccggtggcgttcgtcaggatggtggaggaatcagccaggaggccaaagagggcgggtccagcatgcttatctacagcaattacaattttttggacgtcaaaatcgagctgcaaatcagggcccccgacggcagcctcagcgaacggacgatgagcggcacctacagccccccagggctgcggtttcccaacggcggcatcatcgatactcattttgtcgtgagcggcacctacctcacgtcgtcaaaacaggaatacgctctctgggcgctagacttgcggacgttgacgtggagccgcatcgacgccggcggcgccgtcttcagccagggtagctggaaccgcggcgtcttgtggaacaggcggaacacgtttgtcgtgctgggcaacaggagacggagccttgtggatgactacaaccaccgcaggattaactttaccaatgtctgcatggtcgagctggaggcatttggcttctacgacaatcctcgtaagatcaaccccatgagcggcttcgtcagcgccagcagtccctacaccggacctggcttgagtctggctcgtaaggccgggttcactgccggcggcaggtaccacagccgcgcggccgaggagctgggcgagaaggccctcgcgatgagagagttggccgatatggatatcctgtgtattggcggtgagcggatacccatcaactcgagaatcgtcgcgaggaggtggggcccgtactttgtccagctgctacgcgagggcacggcgacgcaggatggcagtgatgctgccacccttcggtcgaattcggtatctgctcccggaggctcggtccggagctcgaacctcaccatcaccccgtccatcatgagcggcagcaccttgtattcggttggcagctcgaccagcaaagccggaaacgccggcacgtcggccggaaccccggtggacgccgcggccatcaatacggctccgactccgcggacgctgccgcccaacagccgaccgcgttgcctgtatctgccgcacacctacctcaccgtccaggctctcctccacttcctctacacctccagcctccccgccccgtcctccccgctttgcacccctcagattctctgcagcctcctccagatcgcccgcccctaccgcatcgacggcctccttgaggctgtcgtcgagcggctccacggcctcctcgacaaccgcaacgccgcagccgtcttcaacgccacagcgatggcagccggaggcggccgcggtattgacggcaccctgaaccccaacttcttccccgcgtccgccgcgctgtacggccttggcggcaccaccgccgacaacctccagcagtcggagcacgggccgcccgacggaagcagtgctgccggctccgaagcgggcagcagcgctgccacgcgcgggatggcgggcctcacgatcagcacgtccgtgcccggggccccgccgagcagcgacgagctgagtgcgacaacgagcgtcagtggaagcgagtggagcgcgtccgaggtgggcgacagtgatcggggtggtggcggcagagagatctggacgggggagctgagcagcgtcattggcttgcagaagcgggggctgaggggcctcatggaggggagacggatgagggagcggacggggacagcaggtgcagctggggtgcagggcggtggcggcgccggcggcgtcggcggacagcaagctgggcaaccacaggttggacagtatgggcaccccagggtcgggttaggcattgcgggctcataa

SEQ ID NO: 5075 - protein, 1076 aa, Myceliophthora thermophilia
MSGHALTSGGLGQQQARPGNHFSRQSDSESEERLPSKSPSAVISSAFRGIKKITPARPSKLSLRQPSESDVPALESSLSSATIPPGSTRPPPPQHARSLSLQDSLAKPLPEPPPPQLSPASPLTPLAVPQQPRGLATILDTETEENDDSRPGTMESASSMETGGGLYARGEAGHGQDVSVNSSQSSLASSSRHDGQDDRNYDNLTPKSTGPLSAGQSPNNSQPRTQAGGTAVGTATPSAHLSGLMCNVHRTTGREPHPLVGATTTILGDKLYVFGGRILSRSRPAPLTSDLYELDLIRRHWTKVETTGDIPPPRYFHSMCALGDTKLVCYGGMSPTTNQKNIPQDQQPEVTVMSDIYIYDVPTRKWTFIPTQDAPQGRYAHCACILPSSATFVSHRAPLSALQHNPSTGNPNEGRIGINIDGAGGAEMIVVGGQDASNHYIEQISVFNLRSLKWVSTQPLGKSCGAYRSVVAPLPPSVTAKLGKSFPGGVRQDGGGISQEAKEGGSSMLIYSNYNFLDVKIELQIRAPDGSLSERTMSGTYSPPGLRFPNGGIIDTHFVVSGTYLTSSKQEYALWALDLRTLTWSRIDAGGAVFSQGSWNRGVLWNRRNTFVVLGNRRRSLVDDYNHRRINFTNVCMVELEAFGFYDNPRKINPMSGFVSASSPYTGPGLSLARKAGFTAGGRYHSRAAEELGEKALAMRELADMDILCIGGERIPINSRIVARRWGPYFVQLLREGTATQDGSDAATLRSNSVSAPGGSVRSSNLTITPSIMSGSTLYSVGSSTSKAGNAGTSAGTPVDAAAINTAPTPRTLPPNSRPRCLYLPHTYLTVQALLHFLYTSSLPAPSSPLCTPQILCSLLQIARPYRIDGLLEAVVERLHGLLDNRNAAAVFNATAMAAGGGRGIDGTLNPNFFPASAALYGLGGTTADNLQQSEHGPPDGSSAAGSEAGSSAATRGMAGLTISTSVPGAPPSSDELSATTSVSGSEWSASEVGDSDRGGGGREIWTGELSSVIGLQKRGLRGLMEGRRMRERTGTAGAAGVQGGGGAGGVGGQQAGQPQVGQYGHPRVGLGIAGS

SEQ ID NO: 5076 - DNA, 228 bp, Myceliophthora thermophilia
atgagtctcaacaccaaccagcttgatccacgccagcgccctccgaaggctgtggccacggccatcggcgccggagtagagggcgaacaccgtgggcctcgggtgagccacaggcaaagcgccaaggggggcccggccaacatcatcgccaaggtctctggctgtgttcttggcgggaagcgggaggatgacgggctctacttcaccaataacaacagccttatgtga

SEQ ID NO: 5077 - protein, 75 aa, Myceliophthora thermophilia
MSLNTNQLDPRQRPPKAVATAIGAGVEGEHRGPRVSHRQSAKGGPANIIAKVSGCVLGGKREDDGLYFTNNNSLM

SEQ ID NO: 5078 - DNA, 1593 bp, Myceliophthora thermophilia
atggcgcccaagaaggacgatgagacgtggaaagcgcactggaagtgtttcgtcgcctgcggcatcattgtgctctgccccttccagtatggcgtcgactttggcctcatcggcggcctgcaggccatgcgcggcttcctagagatctacggccacgaagcccccgagacaccgctcggatggaacctcggcacggtccggcagcagctcatctcgtcgctcatgacgctcggcgccttcgtcagctccggcacggccggcctcgtggccacctacgtcagccgccgacagtgcctctggatcgcctgcctcttctgctgcgtcgccaatgtcatgatgatggccaccgagaacatcggcgccctctacgccggccgcttcctcatcggcctggccaacggctacttcatgaccttctcgcagctctacctccaggagagcagcccggccagataccgcggcctgttcctgaccgctttccagttcttcacctcctttggcacgctgatcggaaccatcatcgactgggccacggccccgcgcccggataagtcggcctacctgatcccgctcggcatcatctacatcgtgccggccctcttgacggtcgccctcttcatcatccccgagtccccccgctggctgatcctcacgggccggtacgaccagggcgtcaagtcgctgcgctggctgcgcccgcccgcctccgacgtcgacgccgaggcggccgagatcaaggcggccatcgaccgcgagagggagctcggcagcagcgtctcggtgctcgacatgtttgccaacccggttgaccgccgccgcaccaccctcgccgtgtgcagcgtcaccctgcaggccgcctccggctccatgttcatcatcgcatacaaggcctacttcctgggcatgtccaacatttccaacccgttcggcatgagcaatgtgctcagcaccatgggcatcctggccatcttgttcaactcgctcatcgtggtccggtacgggcggcggcgcgtcatcctcatgatcgggctggccctgtgcggcatcttccagctcatcatcgccgtcgtctacgacaagcggccgggaaccacgtcgaccggccaggtgctcgtggccttcacgtgcgtctacatgatgagctacaacggcatgatctcgacctacgcctggctggccggcggcgagatcccgtcgcagcgcctgcgcagctacaccttcggtctggccgccgccgtcggcttcttcttcgcttggctgaccaccttcacggccccgtacttcatcaacccggagtcgctcaactggggcccccgctacggctacatctggttcccctcctgcgtcgtcgccgccctctgggtcttcttcttcctgcccgagactaagggccgcaccctcgaggagatcgacgagatgttcgaggcccggctgcccgcccgtaagttccgcaagcacgtctgcgtcggccatctccccgcccgcgacaaggtggactcgcccgacgccgtcgaggggccgccctcgcctgcggagaacgagaagaagtcagcgagcgacatcaaggtcgaacacgcagaaacaaaggcttga

SEQ ID NO: 5079 - protein, 530 aa, Myceliophthora thermophilia
MAPKKDDETWKAHWKCFVACGIIVLCPFQYGVDFGLIGGLQAMRGFLEIYGHEAPETPLGWNLGTVRQQLISSLMTLGAFVSSGTAGLVATYVSRRQCLWIACLFCCVANVMMMATENIGALYAGRFLIGLANGYFMTFSQLYLQESSPARYRGLFLTAFQFFTSFGTLIGTIIDWATAPRPDKSAYLIPLGIIYIVPALLTVALFIIPESPRWLILTGRYDQGVKSLRWLRPPASDVDAEAAEIKAAIDRERELGSSVSVLDMFANPVDRRRTTLAVCSVTLQAASGSMFIIAYKAYFLGMSNISNPFGMSNVLSTMGILAILFNSLIVVRYGRRRVILMIGLALCGIFQLIIAVVYDKRPGTTSTGQVLVAFTCVYMMSYNGMISTYAWLAGGEIPSQRLRSYTFGLAAAVGFFFAWLTTFTAPYFINPESLNWGPRYGYIWFPSCVVAALWVFFFLPETKGRTLEEIDEMFEARLPARKFRKHVCVGHLPARDKVDSPDAVEGPPSPAENEKKSASDIKVEHAETKA

SEQ ID NO: 5080 - DNA, 1602 bp, Myceliophthora thermophilia
atggggctgtcgaccaagatattgcaaaagatcgtgcggaacgaggccatggcctcggatccgcccgagatctacggctggcgtgtctacttgctcgcctgctcggcatgcttcggcgccatgtccttcggttgggactcgtccgtcatcggcggcgtcatcgtccttccgccgttcatcagggacttcaatcttggtgatccaaagtcgcaggcctcggccaacctgtcggccaacatcgtctcgaccctccaagccggctgtttcctcggcgccctggtcgcctctcccatgacggaccgcttcgggcgcaagtggtgcctcatcggcgtctccctgatcatcatcatcggcatcatcatgcaggccgccgccagcggcaacctgggccccatgtacgccggtcgcttcatcgccggcgccggcgtcggcgcggccagcaccatcaaccccatctacgtgtccgagaacgcgccgcgggcgatccgcggcctgctcaccggcctgtaccagctcttcatcgtgacgggcggcatgatcgccttctggatcaactactcggtcagcatccacttcccggagaccaagatcatgtacgtcttcccgctcgccatccaggcgctcccggccgcgctgctgtgcctgtgcatgctgctctgccaggaatcgccccgctggctggcccgccgggaccgctgggaggacaccaagcgggtcctgtcgcgcatccgcaacctgccgcccgaccacccgtacatccaggacgagttccaggagatcgtcgcccagctcgagcacgagcgccgcctcatcggcgacgccagcttctggaacctgcagcgcgagatgtggaccatcgccggcaaccgccgccgcgtcctcatcagcatcatcctcatgatctgccagcagatgacgggcaccaacgccatcaacacgtacgcgcccaccatcttcaagaacctcggcctgaccggcacctcgacctcgctcttcagcaccggcgtctacggcatcgtcaaggtcaccagctgcatcatcttcctgctcttcatggccgactccctcggccgccgccgcagcctgctctggacctccatcgctcagggtctcgccatgttctacattggcctctacgtccgcatcgccccgcccaaggagggcgaatccgtcccgcccgccggctactttgccctcgtctgcatcttcctctttgcagccttcttccaattcggctggggccccgcctgctggatctacgccagtgagatccccgccgcccggctgcgctcgctcaacgtggcgtacgcggccgccacccagtggctctttaactttgtcgtcgctcgcaccgtgcccgtcatgatcgtcaccatgggcgaaggtggatacggaacatacctcctctttggcagcttctgcttctccatgttcgtctttgtctggttcttcgtgcccgagaccaagggcgtgtcgctcgaggccatggacaagctgttcggcgtcaccgacgagtcgagcaagtcgctgaccgtggacgaggacgccaaggagaaggagaaggatgggccccacgctcgccagaccgaggtggtggcttaa

SEQ ID NO: 5081 - protein, 533 aa, Myceliophthora thermophilia
MGLSTKILQKIVRNEAMASDPPEIYGWRVYLLACSACFGAMSFGWDSSVIGGVIVLPPFIRDFNLGDPKSQASANLSANIVSTLQAGCFLGALVASPMTDRFGRKWCLIGVSLIIIIGIIMQAAASGNLGPMYAGRFIAGAGVGAASTINPIYVSENAPRAIRGLLTGLYQLFIVTGGMIAFWINYSVSIHFPETKIMYVFPLAIQALPAALLCLCMLLCQESPRWLARRDRWEDTKRVLSRIRNLPPDHPYIQDEFQEIVAQLEHERRLIGDASFWNLQREMWTIAGNRRRVLISIILMICQQMTGTNAINTYAPTIFKNLGLTGTSTSLFSTGVYGIVKVTSCIIFLLFMADSLGRRRSLLWTSIAQGLAMFYIGLYVRIAPPKEGESVPPAGYFALVCIFLFAAFFQFGWGPACWIYASEIPAARLRSLNVAYAAATQWLFNFVVARTVPVMIVTMGEGGYGTYLLFGSFCFSMFVFVWFFVPETKGVSLEAMDKLFGVTDESSKSLTVDEDAKEKEKDGPHARQTEVVA

SEQ ID NO: 5082 - DNA, 2034 bp, Myceliophthora thermophilia
atgagtccctcgccagcgaatcccgtcgaccccataaccaccaagattcccgtccccaatccggcccgtcttccctccaacattcccctccgcacactgcccggtcacaaccaacgacaacacccgggccacgatcgagaacagacatccaggctactcggttcatctcacggctacggccaccccgttgacgaacccggctactcggagtctgaggacgacagttcgtggacagatacgggagacattgccgagcagctcgccgacgacgatccgcttcgccagcgggcaacacagacactcggcgacgacgcgttcgccgggtccctcaagaagaggcatcacggaggccgctcctccaagcgggtccggtacagcgagccgttgtctccagggagcagccggtctgcatcacagcacattgacgccatcagcaaagaggcgatccaagtcccaaccgttggcaatcgcaaggcacccagggcggagcgcctactagccgcaatcatgacgggcggcacgagttctatccacggcctgacgggcaagccgttactcggcgagtattttcgcaagtattttcatgacccgacaccggtgcagatcgcgaccatggtcgcgatcctcgagatcggcgctctaatatcctccctcatggttggtcggattggcgacatcattggacgtcgaaagaccatcttctacggttcctgcgtgttcttcgtcggcggtgccctacagagcttcgcggtgaacatgccaatgatgttggtgggaagagtcctggccggtctgggcgtcggcatgctgtcgaccatcgtacccgtctaccagtctgagatctcgcctccccataaccgtggccacctcgcgtgcatcgagttcacgggaaatattaccggatatgccacctccgtttgggtcgactacttctgcatgttcatcgagggcgacttgtcctggcgtctgcccttgctgatgcagtgtataatgggcggcctgctcggtttgggaagcttgatcatcgtcgagtctcctagatggcttctggacaacgaccacgacgaggagggcatcgtcgttatcgccaacctctatggtggcggtgacatccacaacccccgtgctcgggacgagttccgcgacatcaagatgaacgttctcctgcagcgacaggagggcgagcgcacctacggcgagatgttcaagcggtacagccgccgcgtcttcattgccatgtcggcgcaggctctggctcagctgaacggcatcaatgtcatctcgtactacgccccttacctttttgagcgggccggctggatcggccacgccgccgtgctgatggccggcatcaacggcatcacctatgtcctgtcgaccattccgccgtggtacattgtggaccgctggggtcggcggcccatcctgctgtccggcgctattgccatgtgcctgtcgctctcgtcgatcgcgtacgtccagtaccttgacatccccttgacgcccaagctggtcgtcattctggtcgtcatatacaacgcagcgtttggctactcgtggggccccgttccctggctttacccgcccgagattctgcctctcaagatccgctccaagggtgccagcttgtcgacagccaccaactgggccttcaactggctggtgggcgagatgacgcccatcctgcaggagttgattgcctggcgcttcgacgaagacgaacatgagaagctgcttggtgtcatgaccccgcaatcgagctacgccgtcgcgcatccttcacaacaccgctcgcaacctcctccctgcctgcaatcgtccttgcgcaacaaacgggctcgccctatcacccccccttcgcccctcccaccgaccgaagagagcgacaaaggtaccacctccgaccagaccggcgggggttctttatggaccctcacccgctggcccaggccctttcgcgacccttccgctgaggactttggtctcggctggacccccgagaccaccgtctgctggctgacggctgctccgtga

SEQ ID NO: 5083 - protein, 677 aa, Myceliophthora thermophilia
MSPSPANPVDPITTKIPVPNPARLPSNIPLRTLPGHNQRQHPGHDREQTSRLLGSSHGYGHPVDEPGYSESEDDSSWTDTGDIAEQLADDDPLRQRATQTLGDDAFAGSLKKRHHGGRSSKRVRYSEPLSPGSSRSASQHIDAISKEAIQVPTVGNRKAPRAERLLAAIMTGGTSSIHGLTGKPLLGEYFRKYFHDPTPVQIATMVAILEIGALISSLMVGRIGDIIGRRKTIFYGSCVFFVGGALQSFAVNMPMMLVGRVLAGLGVGMLSTIVPVYQSEISPPHNRGHLACIEFTGNITGYATSVWVDYFCMFIEGDLSWRLPLLMQCIMGGLLGLGSLIIVESPRWLLDNDHDEEGIVVIANLYGGGDIHNPRARDEFRDIKMNVLLQRQEGERTYGEMFKRYSRRVFIAMSAQALAQLNGINVISYYAPYLFERAGWIGHAAVLMAGINGITYVLSTIPPWYIVDRWGRRPILLSGAIAMCLSLSSIAYVQYLDIPLTPKLVVILVVIYNAAFGYSWGPVPWLYPPEILPLKIRSKGASLSTATNWAFNWLVGEMTPILQELIAWRFDEDEHEKLLGVMTPQSSYAVAHPSQHRSQPPPCLQSSLRNKRARPITPPSPLPPTEESDKGTTSDQTGGGSLWTLTRWPRPFRDPSAEDFGLGWTPETTVCWLTAAP

SEQ ID NO: 5084 - DNA, 1188 bp, Myceliophthora thermophilia
atggcgcccaagacgacatcccctgggatgacgacaaggagcagcagcagcagcagcagcagcagtaagggcaataccaaacgcaaacccgtcaaaccgccgaatgatgctctgctggcccagcaatacggcggcgggcacgtcggcggctgggttgaccggctcccggcgagcgtgattccctacgtgcaactggcgcgcctgagcccgccggcaggactgctgctcatcttcttcccgcacttcttcggcatcctgcacgccgccatcgtgctgctgtcgtcgcggggcagcagccacgtcggcagcagcagcagcagcgccgcggcggcaatcctccgggcgtgcgccatcaccctcgccggcagcttcttctcgtccaacgcggcgcacgcctggaacgacctggtcgacgccccgatggaccgacaggtagcgcgcacgcgggggcggcccgtcgcccggggcgccatctcgccgctcggggccttcctgttcgccgtctcgcaggcgctgctggccgcgggaaggaggggcgtgctcgccgcctgctacgcgctgcccaacatactcgccatcatctactacccgtacgcgaagcggcacacacacctggcgcaggtcgtgctgggcttctgcctgtcgtacggcgtcgtcatgggcagctgcgccatgggtctgttcccccagagcatcccggtggtggtgcacatcccgaccgtgtgcctgatgggggcgtgcctgctgtggaccgtcctctacgacaccgtctacgcgcaccaggacgtcgaggacgaccggaagctgggactcaagagcacggccgtcctgctgggagaccggaccaagccggcgctctggtgcgtgctcggggccatgctcgccctgctggccgtgccggggcgggcggccggaatggctccgccgtactacctcttcacgctgggaggctgcctggcctccctcggcaccatggtgcaccgcgtcgatctcaaggaacctgcgagctgttggtggtggttccgctacagcttctggctggcggggggttctatcgctgccggactcgtatccgagtacctaatacgggctgctccctgggcggagctgtgcaaaccctggctgcatctctttccaaaacttcccctcagtttagcagctcccgacgttgagtctgtcactttctaa

SEQ ID NO: 5085 - protein, 395 aa, Myceliophthora thermophilia
MAPKTTSPGMTTRSSSSSSSSSKGNTKRKPVKPPNDALLAQQYGGGHVGGWVDRLPASVIPYVQLARLSPPAGLLLIFFPHFFGILHAAIVLLSSRGSSHVGSSSSSAAAAILRACAITLAGSFFSSNAAHAWNDLVDAPMDRQVARTRGRPVARGAISPLGAFLFAVSQALLAAGRRGVLAACYALPNILAIIYYPYAKRHTHLAQVVLGFCLSYGVVMGSCAMGLFPQSIPVVVHIPTVCLMGACLLWTVLYDTVYAHQDVEDDRKLGLKSTAVLLGDRTKPALWCVLGAMLALLAVPGRAAGMAPPYYLFTLGGCLASLGTMVHRVDLKEPASCWWWFRYSFWLAGGSIAAGLVSEYLIRAAPWAELCKPWLHLFPKLPLSLAAPDVESVTF

SEQ ID NO: 5086 - DNA, 1089 bp, Myceliophthora thermophilia
atggcgtctcatatgcctgccggctatgccgaggaccgcctacaccggtacctcgcgcactggacgcgggacccgtcgaatgtgtccaagctcgatattgctgccatcacctgggcgaccgaggaggagcggcgggcaagacagaagaagtactgccaggtagcatctgactactacgatctcgtcacgccgctgtacgagcaaggatggggtcagcacttccactacacgcccctcacgcccggcctctctatccgggagagcatgacggcgtacgaaaagacgttttccgggctggcccgcctcaagaaggacatgcgcgttctggacctgggatgcggcatcggcgggccagcgagaaccatcgcctcgaccatcgggtgtaggatcatgggcatcacgaacaatgcctggcacgtcgaacgtgggacggcgctcacaaaggaggctggactggaacatctgatcacgttcattgagggggactttctgaaattgccgtttgccgacgagtccttcgatgcggcatactcgatcgagtcgttgtgccacgcccctgacccggccgaggtctacagggaggtcaagcgggtgctgaagccaggcgcgccgttcacgtttcacgagtttgccatgacggagcagtttgacgagagcgtccctgagcaccgcaaggtccgcaactggatcgagtttggcaacggcatcaccaagatgccgtgggtgcccgacatgcgggcgggggtaagggcggctgggttcgaactcctccgagaagaggacatggcgttccgcagctcgccggccccgtggtactatggccccgccggcgatatcgggtgggcatggaagatacccggatggcccgacttctggaaggtgttccagatgtgggatcccttccgcgggtgtgctcatgccgtttaccgcgtgatgatcctcgttggcatggcacccccggaggtctcgaccctcatggacaccatgtggtactgtaccaggagcgtggttcaaggcgggaggatgggcatcttcacgcccatgtacgtctttgtttgccgaaaaccggccggtgggttggaatcttga

SEQ ID NO: 5087 - protein, 362 aa, Myceliophthora thermophilia
MASHMPAGYAEDRLHRYLAHWTRDPSNVSKLDIAAITWATEEERRARQKKYCQVASDYYDLVTPLYEQGWGQHFHYTPLTPGLSIRESMTAYEKTFSGLARLKKDMRVLDLGCGIGGPARTIASTIGCRIMGITNNAWHVERGTALTKEAGLEHLITFIEGDFLKLPFADESFDAAYSIESLCHAPDPAEVYREVKRVLKPGAPFTFHEFAMTEQFDESVPEHRKVRNWIEFGNGITKMPWVPDMRAGVRAAGFELLREEDMAFRSSPAPWYYGPAGDIGWAWKIPGWPDFWKVFQMWDPFRGCAHAVYRVMILVGMAPPEVSTLMDTMWYCTRSVVQGGRMGIFTPMYVFVCRKPAGGLES

SEQ ID NO: 5088 - DNA, 600 bp, Myceliophthora thermophilia
atgcacaacaagggcccagctccgcagctccatgacggcagcaatctccgcattggcattgtgcacgcgcgatggaataacaccattatcgagcccctccttgccggcgcaaaggctaaactcaaggagtgtggcgtgaaggactcgaacattgtggtacaaaccgtcccgggctcatgggagctgccaatcgccgtccagcgcctctacgcagcgtcgcaagttcaatcggcatcggccggcagcggcggctccgcgggggacctgctcggcagctcaacaaccgacctggcatctctcccctcagcctcctcctcaaagggaccgttcgatgccatcattgccattggggtgctcattaagggcgagacgatgcatttcgagtacatcgccgggagcgtctcggacgggttgatgcgcgtctccctggacacaggtgtgccagtcatttttggcgttctcaccgtcctgaacgaggagcaagccaaggttcgggccggtctcatcgtggggagccacaaccacggcgaagactggggcctcgccgcggttgaaatgggagtaaaacggaaggcctgggctgccggaaccattgaatag

SEQ ID NO: 5089 - protein, 199 aa, Myceliophthora thermophilia
MHNKGPAPQLHDGSNLRIGIVHARWNNTIIEPLLAGAKAKLKECGVKDSNIVVQTVPGSWELPIAVQRLYAASQVQSASAGSGGSAGDLLGSSTTDLASLPSASSSKGPFDAIIAIGVLIKGETMHFEYIAGSVSDGLMRVSLDTGVPVIFGVLTVLNEEQAKVRAGLIVGSHNHGEDWGLAAVEMGVKRKAWAAGTIE

SEQ ID NO: 5090 - DNA, 972 bp, Myceliophthora thermophilia
atggccaactcgctcgagcaactcaaggctaccggcacggtcgttgttagcgactccggtgactttgcctccatcggcaagtacaagccccaggatgccaccaccaacccgtccctgatcctcgccgcaacaaagaagcccgagtatgcggggctcttggacattgctgtcgccaaggccaaggccgagggcggctcgatcgaccagcaggttgactcggccctggaccacctgctcgtccaattcggcaagaagatccttgagatcatccccggcaaggtctccaccgaggtcgatgccgctttctccttcagcacaaaggactcggttgacaaggcgcttcacatcatcaagctctacgagaaggagggtatcagcaaggaccgtgtcttgatcaagatcgcctcgacatgggagggtatcaaggcggccgagatcctgcagcgggaccacggcgtcaactgcaacctgacgctcatgttctcgatcgtccaggccatcgccgccgccgaggctggtgcctacctcatctcccccttcgttggccgtatccttgactggttcaaggcggccaccaagaaggactacaccaaggaggaggatccgggtgttgccagcgtcaagaacatcttcaactactacaagaagttcggctacaagaccatcgtcatgggtgcctccttccgcaacaccggcgagatcaccgagctggccggctgcgactacctgaccatctctcccagccttcttgaggagctcatcaactcgaccgagcccgttcccaagaagctcgatgccgccgccgccagcgcgctcgacatccagaagaggacgtacatcaacgaggaggccaacttccgcttcgacttcaacgaggaccagatggccgtcgagaagcttcgggaaggcatcagcaagtttgcggccgacgccgtcaccctcaagggtctcatcagggccaagctggagtaa

SEQ ID NO: 5091 - protein, 323 aa, Myceliophthora thermophilia
MANSLEQLKATGTVVVSDSGDFASIGKYKPQDATTNPSLILAATKKPEYAGLLDIAVAKAKAEGGSIDQQVDSALDHLLVQFGKKILEIIPGKVSTEVDAAFSFSTKDSVDKALHIIKLYEKEGISKDRVLIKIASTWEGIKAAEILQRDHGVNCNLTLMFSIVQAIAAAEAGAYLISPFVGRILDWFKAATKKDYTKEEDPGVASVKNIFNYYKKFGYKTIVMGASFRNTGEITELAGCDYLTISPSLLEELINSTEPVPKKLDAAAASALDIQKRTYINEEANFRFDFNEDQMAVEKLREGISKFAADAVTLKGLIRAKLE

SEQ ID NO: 5092 - DNA, 1227 bp, Myceliophthora thermophilia
atggcgttcggaaagctctacacttactcgggcaacccccgctctacggccatccgcgccgtcgcgaaggccaacaacctcgagcttgaggaggtcgaggtcgacaccaagaacccgagcgcggacttcctgaaggccaacccccttcacaaggtcccgactttcgtcggcgccgatggtttcgttctcaccgagtgcattgccatcgctgtctacgtcacctcgcagaacgagaagaccaccctcctgggcaagaccaagcaggactatgcctccatcctgaggtggatgtcgttcttcaacagcgaggtgctgcccaagctcggcagctggttccgtcctctcctcggccgcgacccctacaacaagaaggctgtggacgatgcctcgaaggctgttgccgaggtcgttgcagtcgttgaggctcacctccgcgacaacacctacctcgttggcgagcgcatcacccttgctgatatcttcggcgccggccttatctcgcgtggcttcgagtacttcttcgacaaggagtggcgccagaagaaccccaacgtctcgcgctggtacgagactgtctacaaccagcccatctactcggctgtcgttcctccattcgcacttctcgatacccccaagttgaccaatgtccctcccaagaaggctgagcagcccaagcccgctcctaagccggctgccgagcccaagcccgaggctgaggagcaggagcagccggcccccaagcccaagcatcctcttgaggccctgcccaagcctaccttcgctcttgacgagtggaagcgttattactcgaacaacgacacccccgtcgccctgaagtggttctgggagaacgtcaacttcgaggagtactcgatctggaagtgcaagtacaagtacaacgatgagctcaccttgacgttcatgtcgaacaacctcatcggcggcttcaacacccgtctcgaggcttcccgcaagtatgtcttcggctgcgcctcggtgtacggcaccaacaacgactccatcatccagggtgccttcgtcatccgcggccaggagtacaagcccgtcttcgatgtggctcccgactacgagagctacgagttcatcaagctcgacccctccaaccccgaggaccgtgagtacgttgagcgggagtggtcgtgggacaagccgatcgttgtcgacggcaaggagtacccccacgccgccggcaaggtcttcaaataa

SEQ ID NO: 5093 - protein, 408 aa, Myceliophthora thermophilia
MAFGKLYTYSGNPRSTAIRAVAKANNLELEEVEVDTKNPSADFLKANPLHKVPTFVGADGFVLTECIAIAVYVTSQNEKTTLLGKTKQDYASILRWMSFFNSEVLPKLGSWFRPLLGRDPYNKKAVDDASKAVAEVVAVVEAHLRDNTYLVGERITLADIFGAGLISRGFEYFFDKEWRQKNPNVSRWYETVYNQPIYSAVVPPFALLDTPKLTNVPPKKAEQPKPAPKPAAEPKPEAEEQEQPAPKPKHPLEALPKPTFALDEWKRYYSNNDTPVALKWFWENVNFEEYSIWKCKYKYNDELTLTFMSNNLIGGFNTRLEASRKYVFGCASVYGTNNDSIIQGAFVIRGQEYKPVFDVAPDYESYEFIKLDPSNPEDREYVEREWSWDKPIVVDGKEYPHAAGKVFK

SEQ ID NO: 5094 - DNA, 732 bp, Myceliophthora thermophilia
atgcctgacgtcaagcccgctccgacccaatgtgtcgggcctgtctaccgctcggagagccaaaaaccgacggcggcagtctcgacgggcgtggagtttgacaccgtcaccatccttccgcagactccccagctgattgccctgctctcaatcatccgcgacaggaacacgcagcgcggggatttcatcttctacgccaacaggatcattcgcctcctcgtcgaggagggcctgaatcatcttcctactgtcgagcacaccgtcacgactccagtcgggcgcacctatgagggtctggcattccagggcaagatttgcggcgtgtccatcatgcgggcgggcgaggccatggagcaaggcttgagggagtgctgccggtcggtgaggatcggcaagatcctgatccagagggacgaggaatcggcccagcccaggctcttttacgacaagctgcccgatgatatcgccgatagatgggtcctgctgctcgaccctatgcttgcgacaggtggttccgccatcatggctgtcgatgttctaaagtcgcgcggcgtgcctgaggaacgaatcctgttcctgaacgtgctcgccagtccccagggaattcagaattttgcgaccaagtttcccaagcttcaggtggtaaccgcgtttgttgaccaagggcttgacgagaagaactacatcacacctggcctcggtgacttcggcgacaggtattataccgtgtga

SEQ ID NO: 5095 - protein, 243 aa, Myceliophthora thermophilia
MPDVKPAPTQCVGPVYRSESQKPTAAVSTGVEFDTVTILPQTPQLIALLSIIRDRNTQRGDFIFYANRIIRLLVEEGLNHLPTVEHTVTTPVGRTYEGLAFQGKICGVSIMRAGEAMEQGLRECCRSVRIGKILIQRDEESAQPRLFYDKLPDDIADRWVLLLDPMLATGGSAIMAVDVLKSRGVPEERILFLNVLASPQGIQNFATKFPKLQVVTAFVDQGLDEKNYITPGLGDFGDRYYTV

SEQ ID NO: 5096 - DNA, 11664 bp, Myceliophthora thermophilia
atggcgagcagtctcatagaggatgtggtgaggaagcttagtgccccggagaccgagcctcgggtcaaggtcgaggcagcatcggcgctgcgcgacagcctcgaccactacaccaccggcccgggttacccgatcttcctcaagcgggtaatgcccacattcatcagcatcctccgccagccatgcgtgctccagacatccacgcccgaccaggccaatgcacagaaactgcgaaactgcgttctcgagatcttccaccggttacccacggcgccgtccccgcccgaacctttcgaaccgtacgcggaggaggtggtggatctgttgatgcagctggtgcgcaatgacaacgaggacaatgctgtgctgtccgtcaaggtcatctcggacatcatgcggcaccaacataagatcatgggcaacaaggtacaggccttcctatccctgatccaggagctgtttgagcagctcgacaaggtcgtccgcgaacaactggacaacaccgccgcgcccaccgcgccggggccgccttcgacgcctggcagcacccagaccaccttcatgccgcaccagcagtctccgagggcggcctcgcccgttgcgacgggagcccccgatttcagcgccgacgccagccagcagtcgaaccgcaccctactgaagggtatgcagtcattcaaggtgctggcagagtgtcccatcattgtcgtctccatattccaggtctaccgctcgagcgtcgcgcagaacgtcaaggccttcgtgcccctgatcaagcaggctctcctctgccaggcgcgggcccaggaccaggcgcacaaggacgccgctgcccgcggcaccattcataccggcgtcagccccaatatcaagaaccgggctgcgtttggggagttcatcaccgcccaagtcaagactatgagcttcttggcgtacctgctccggcaatactctggccagctcacggacttcctgccctccctcccggagatcatcgtccgcctcttgaaagactgtccccgggaaaagtcgggagcccgcaaggagttgctggtggccattcggcacatcatcaacttcaatttccggaagatcttcattcccaagattgacgacctgttggacgagcggacgctcatcggcgacggcttgacggtgcacgagaccatgcggccgcttgcgtacagcatgctggccgaccttatccaccacgttcgcgaccatctctcgcccgagcagatccgcaagacggtcgaggtctacacgcgaaacctccaggacaactttccgggaacaagcttccagaccatgagcgcgaagctcctcctcaacatggccgagttcatcgcccggatgcccaacaaagttgatgcgcggcactacctcatcatgatcctcaacgcgatcgcggacaagtttgccgccatgaacaggcaatatccgaacgccgtcaagctctccaagcaatacgctcagcaggcggccgagggcgctcccgagacgtaccttcctgacaaggagcacccgccggagtgggacgagatcgacatcttcaacgcgatgccgatcaaggcgtcccgcgaccgcgccggcgaccccgttgtcgacaacaagttcctcttccggaacctgatgaccggcctgaagaacaccttctaccagctaaagagctgcaatcaggagggtgttgtggacctgacccacgcgcccgcccactggaaggatgtcgcctacggcttcacggcggaggaggtcaaggtcatcatcaagctgtttcgcgaaggtgcctacgtgttccggtactacgagatcgagaagccggccgccgagtcgccgtatagctcgccggtcgaatacatggccaatttctacatgatctcgagcagcaaagaagaaaaggagctcctcgagacgtttgccaccgtcttccactgcatcgaccctgccacgtttcacgaggtgttccagcaggagatcccacgactttacgacatgattcatgagcataccgccctccttcacataccccagtttttccttgctagtgaggctaccagccccagcttctgcggcatgctgctgcgcttcttgatggagcgcatcgaggacgtcggctcggccgacatcaagaagtcctccatcctgctccgactcttcaaattggcgttcatggcggtcaccctctttgcttctcagaacgagcaggtgctgctcccccacgtcgtcgacattgtgaccaagtccatcgagctgtcgaccaaggcagaggagccgatgaattacttcctgctgctgaggtcgctgttccggagcattggcggcggcaagttcgagcacctctacaagcagatactgccgcttctcgagatgctcctcgacgtcctcaacaacctcctgttggcggctcgcaagcccgccgagcgcgacctctacgtggagctctgcctcacggtaccggcccgtctgagcaacctcctgccccatctcagcttcctcatgcgcccgctagtcgtagcgctacgcgcgggcacagaccttgtcggccaggggctgcgtactctcgaattgtgcgttgataatctcaccgccgactatctggatccgatcatggcgcctgtcatcgacgagctcatgacggccctctttgaccacctcaagccccacccgtacagccacttccacgctcacaccacgctccggattctcgggaagctgggtggtcgcaatcggaagttcatgacggacgccctgcccgtcaccttccagcaatacgtcgatgatcggtccagcttcgatgtccggctcatcgggtcgaagcgagacagggcctttccggcacatctcggaatcgagctggccatccagaagttgatggaggtgccgaagccagtcaaggggcaactgccatcgcccgcgaagcaatacgacccgtattacaagagacaggccctgaatctgatcatcgcccaggtcaaacttcgggtcggctacgagaaccttccggacgatcttccgcgtcttgttcgccttcaggcgcaggacctgattaaccgcaacaaggatgtagacatctccgtctttgagacttcggagcgcgagcggtcaatggccaagaagcacgacgaggagaatctgctaaagcgcctgctcaaggctctcctgtatgcccagtccatccccgacttcaaggccgaggtggatgcgctgctgctgaacctcgctcgccacttcaccatcatcgaggtggggcgggctttgatcgaaatgaagaaggcctacagccccttcgatacgaagctgggcgaaggccctctattcgtcgacaacagggtcctctccgacgccatattggagtctctggcttccgagaatcccgacatccgcgacgcggctgaacgtctcattaaggagatgtacaactcggccgtcatcatattcggatcgccctcacacgtcgcccgtctgtccttcttcaacagcctggctgctacgttctgccacggctgctatgaagaggagtggtttaccaagacgggcgggacattggggatcaaggctctgctgaccgaagttgagcttggcgatctatgggtagcggcgaagcagatcgagttcgtccgtgcccttatgtacgtcatcaaggacatgccccaggatctgcccgaaaagacacggcgatcggcacaggtcacgctcgagatactcctcactcgactcaccaaaaacgttaagaaggctgactgcatcttcgctccacccgcggcggggattcagccgccacagccccctccgaaaccttcccggattgcccagatcgtcatgatgctcaacggggagctctcgcacatgaaccggcacgtccgagacacggcgaggaggtctctggagctgattgcgaaggccgccggggccgaggtctgggagctcctcgagccccatcgcaagcatctgctgcagcctatctacgcaaagcctctgcgggctttgcccttcgccatccagatcggcttcatcgacgccgtcacctactacatgtcgttgaagcgcggctttgtcgcctttgacgagaacctgaatcgtcttctgatggagtcgttggctttggcagacgccagcgacgagtctctggctgggaagatgctcgagttcaggacacataacttcattgtcaatcttcgcgtggcctgtatcaagattctcagcagcgcgatgagctttgacgaattcgggagcggtcccaacaatcccacgaggctcaaggtcgtctcggtcttcttcaaatgtctgtattccgactctcagtcgacaatcgaagcggccaacgacgcactgaggacggtcctgcagatgactagcaaattgcctaaggatctccttcagtcgggtctccggcccgtccttgccagtctgcaggatgctaaacgcttgacggttcacagcctggacaacctcggccgactgctgcggctgttgacgacctacttcaaggtggagattggggcgcgcctcctcgagcacgtcaagctcattgccgagcccaacttcctccaacaggtctccttcacctttttcgagcagcacaactccttaaaggttatcgccgccgtcttcaacatcttccatctgcttcctgacgccgccaagcagttcaaggagcgggtcatcgacaacgtcctcgacctggaggagaagctgcgcaggacgcaccacagcccgttccgcctgcccctgtacaagtacctcaacaagtacccgtcagacgtctgggccttcaccctgggcaagcttgaggagttgaggtacggccggttcctgtcccaggtgctccggcatcctgacagccaagtgctccgagactatggcgccgcaaacgtcgagttcatcatcaggacgtgcaataatatcgtcacccagggcaaggagaccaaattcatcgcgatcgtcaacaccatcaacatgttggatgccctgtgccagtttcccggcaccctgtcgtggttggacaacaaggagcacattgattggctgaagcaggtcggaaaggagctggaacggaacttgaaagccaacagcctgccgccggttctccggcttccggcccatcaggcctcggagcagctcatgaccatcttgaccaaggctttggggcgaaatcccggcgatctggactcgctctttgctctcatcgagggcattacggccgatgatttccgcgagacgccggccgtgctgtcgcacatatacaaacacatcatctgcagcgactcgatcgacttctggaagaccaccgtgcttcgctgtcttgatatttacgccggcaagagcgcatcgcagcgaaccaaatggtatctgctccacaacattgtcaatccgattgtagcaatggatgtgatgcggcactggaaccgcggcgaacctggcaggggcccacgcttcctcgacaaggccattattgactcgatcaacaccaagatctggaaggtcaacttgcctgacccccaggaagacctgttgcaaccgcggatcgaccacacccgcatggaggtgcttcagctttccgccatgatcgtcaaatatcaccacaccgtcttgcacgatgcccgaaaggatttcatcaagtttggctggacctacattcggctcgacgacgtcatcaacaagcacgcggcgtacgtggtgataggctatttcatcgcccaccacgagacgccggccaagattgtcacccagatctatttctccctgctgaagacgaaccagaacgagggccgcgcgctcgtcacccaggccttggaactgatggcaccggttatgcctaagaggtgcaacacggcactgactgaccgcaaccccgtctgggcggttgcaccgcggcgtattctcgccgaggagagccagaacgtgcagcagatgacgtgcatcttccacttcctcgtccggcacccggatctgttctaccacactagggacaagttcgccatgctgatcattcaatgcctccgcaaagtggcatcgccgcccaatccgtccaacgagagccggaagctcgcgctcaacatgatgtggctgatctggcagtgggaagagcgacgtgtggagggaaagatgagcgagccactccgcgctgcatccgagtcacccaacaccaagaagcgcaagctagaggatcagcaggcatcgtctccttcggcggtgcgacagccggagaaggcagagttccagatccccgcggtgggccgccaaaagatgatcaagtacttggtggagttcatcgcgcagctgaacgagcggtatccgctcccatccgctaagccgcgcgatcctgccttaccagtgctgccttcgcaggcgccggacttgtgcaagaaggccatgactctcttgtataacctccttcaaccgcaatactggggagacctggacgtcgatctgttccccaatgtcaccgacgtggtattggccagcgagaagtctgcaagccttctcgccgccgatccttcggacacggacaaggttgatgataaattcatcactaacatcatcaacacgttgcaggttgtccgcatcatcctcaacttcaagtctaatgagtggatcctcaagaacatgccccagatacagaagatcttggagaagtgcctgaggtccgagaatcccgagatccaggactgcctacacgtggcggatagggagtacgacggcgaccgggacatcaagccgatcgtgaaacgcatcctggacgccgttccggaagacgtcccgatggaggatgcggatgccgacggtgaatcagaaacgcaaacctcggagatcatcactttcttctccagcatcgccacggagagcatggccgcatcgaattacgtgtccggcatcaaccttttgtggtcccttggatctcgcaagccgtccgccattgaccagcacataccctccatcatgaagtcgctgcagtcaaagctcgcccgcgatcacgtctctcactacgcggcattggcgcatcaggccagtggtatgcgggcgcagcaagatccgaacgcgccgaccgagatgaacccctacgacctcgagatccagacgaacctaatcctcaaggcgatcgaggtcactgcgatgcgcatggacatcctcggggacaacaggcgtcccttcctgagcgtcctggcaaccatcgtcgagaagtcgctgcatgtgcgtctatgtgagaggatattggagatggtggagggctgggtcttccgctccgaaggaacgtggcccacgctgaaggagaagacggcggttctgcacaagatgatctcttttgagcaccgccaggatccgcacatgctaatgaagttcctccgactcgtccttcggatctacgaagaccccaagatcacgcggacggagttgacggttcgcatggagcacgcgttcctcattggtacccgggctctcgatgtcgagatgcgcaacaagttcatgaccatcttcgacaaatgcctctccaagaccgcaagcgcgcgattggcctatgtcatcctggggcagaactgggacaccctggcagactcttactggctagcgcaggcgtcccagctcctcttgggtggcgtggacatgagcccggtcatccagcttcaccatgaggatttccggacgctgcagctttcccagctgttcggtccctacaccaaggacaaccgcgaaccgacgctgatcagcgacgacaagtacgaatcctttatggcgaaccaccggcgcttcatggccgagcttggcgacgtcagggtccgagatatcctcgaacctatcactcagctgcagcacatcgatcccaactttgcgaacgagctttgggtgacgctgttcccgatgttctggtctgcaacagcgaaggaggataggccggacctcgaacgcggcctggtggcgctgctcacgaaggactaccactcgcgtcagatggacaagcggccaaatgtagtgcaatcactgctgacgggagccgtgagaacctggccgcactgcaagatccccccgcacgtcctcaagttcgaagccaagacgtatgacgcgtggtacacggcgctctaccaactcgagaactcggccatcaagccggaaatcgactctgcgaccgtgcgagagagcaacctggacgcgctggtcgatctctacgcgtctcttggcgaggacgatttgttctacgggacgtggcgtcgccgctgccagtttgtggaaacgaatgcggcgctgtcgtacgagcaacacggcatgtgggaaaaggcccagcggatgtatgagacggctcagatcaaagccaggacgggcgtgattcccttctctgagtcggagtacatgctctgggaggaccactgggtgctctgcgcccagaagctccagcagtgggagatcctccaggactttgccaagcacgagaacttccaagatctgctcctggagtgcgcgtggcggaacccggagtactggcagaaccaggagaaccgcgaccagctggatacgctcatcaagggcgtcatggacgcgccgaccccgagacgatcgttcttccaggcgttcatgtccctgctgaagctacacaacaagcaggaaagcatgcaggacttcaaccgtgtcgtggacgaggccatccagctgtccatcaggaagtggcaccagctgccgaagcgtctcacagcagctcatatcccggttcttcagaactttcagcagctcgtcgagcttcatgatgccagcgtcatctctcagagtctgaacagcaccaacgccaacaatctcgacgtcaagtctggcgagctgaagctgctgctcgggtcgtggagggatagacttcccaacatgtgggacgatatcgtcgcatggcaagatctggttacctggcggcagcacattttcgggctcatcaacgcgacttacctgcaacttgtgcccgcgcagccgcagaatccgggcggggtctcattcgcgtaccggggatatcacgagacagcatggatcatcaaccgctttgcacacgtcgccaggaagcacgcgctgccggatgtctgcattagccagctgagccgcatctacacgcttcctaacattgagattcaggaggcgttcctgaagctgagggagcaggccaagtgccactaccaaaaccccgatgagctaacgagcgggctggacgttatcaacaacacaaacctcaactacttcagcgcgccacaaaaggccgagttctacactttgaagggcatgttcttggagaagctcaaccagaagaatgaagccgacagcgccttcggtaccgccctctatttcgacatcacggcggctaaggcatgggcggagtggggctacttcaacgacagaaagttcaaggagaacccgacagacttggcagcggccaagcaggccctcacgagctatctgcaggccgcgtcgagctacaagaatcacaagtcgcgaaagctgattgcgcgcatcctctggttgctgagtctggacgatgcgaacggcacgatcgcgtcagggttcgatgacttcaagggcgagatcctcgtctggtggtggatcacgttcatcccgcaacttctggtcggcctcgggcacaaggagtcgccgcgggtgcagcacgtcctcctcaagatcgccaagacctacccgcaagcgctgtacttccagctcagaacgaaccgggaggacatgctcgccatcaagaagaaccaggatgccaaggagcgcgcccggcgtgcacaggcacaggccgcggccaacaggccgaatgcttctcctcagttgacgaagaaagatccggccgccgctggcaacagcgactctcgaccggccacggccaacggggacgcgagcggacaagtcaagacggaggctaagcccgaaggcgaagccgcgaacacaccaaaggctccgcctccggcgaccaacgggacggcacagggcgagcagacgggtggtggtggtggcagtggtggaccacaaaagaggccgccgtgggagcttaccgaagagatcatgagcgtcctcaaaacggccttccccttgctcgcgctgtcgatggagactatggtggaccagattcagaagcacttcaagtgcccgccggatgaggacgcttataggttgatcgttgccctcctgaatgacgggctcgcctacgtcagccggatgccgacgtcgtacgcccgggatgttaagcttccctcggccacggagaacaacatcacccggtttgccgagacaatcctgccaagccacatccgtggcacgttcgaagcggactttgtcaaggtcaagccgaccatgtacgagtacatccacaaccttcgcaagtggcgcgacaagttcgaggagaagctcgacaggcgggcgtcgccggtgccgctcgaaagcttcgctcattattcgccgcacctgagcgagttccggtaccagaagtttgacgacgtcgaggtgccgggccagtacctgcagcacaaggataagaaccaggatttcgtccgcatcgacaggttcctgcccaacgtggagctcgtgcgcacgataggggcgtcgcaccggcggctgcagattcgcggtcacgacggcagcgtgcacacgtttgcggtgcagcaccctgcagcgcggcactgccggcgcgaggagcgcatcctgcagctcttccggcagctcaaccagaccctggccagcaagaaggagagccgccggagggacctgcagtttacgctgccgctgatggtgcctcttgcgccccacatcaggatcgtgcaggaggacacgacgtacatcacgctgcagggagtgtacgaggaccactgccggcgccacgggatccaaaaggacgagccgatgctgtacacgatggagaagttgagggggctggcggacactaagggaccggtaagttccattcgtcgactgtcttgttctgttcctggacagggtgggctcaccaggcacgagttgcagaaaccggccgagcacgcggcaacggcacggctggaagtgatgcgggcgatccaggagaagtttgtggacaacacggtggcgctcgagtacttccagggcacgttccccgacttctccgagttctggctcttccggcgacggttctcgtaccagctggcggcgctgaccttcatgacgtacgtgctgcacatcgacaagcggtacccgcacaagatgcacatcgcgcggggatcgggcaatatctggggctcggagctcatctcgttcatggcggccaaccggccgtacttccacaaccaggagccggtgccgttccggctcacgcccaatctgcagacgctcatgggaccgctggcgaccgagggtatctttgcgtgctcggtcatggcgatcgcgcggtgcctgacggagcccgagttccagctggagcacgcgctgacgctgtttgtgcgggacgagatgatgtactggttcaccagctcgcaccgcagcgtggcgctcacggagaaccagctgcgcgagacggtgcaggcgaacagcgacatgattgtcaagaaggcggtctcgcttgcccaggcgcccgcgggcaacctgcctgcgcaccagacggtgatcgacctgatcgccaaggcggtcaaccccatgaacttggccatgtgtgacgcgctgtggatgccgtatctgtga

SEQ ID NO: 5097 - protein, 3887 aa, Myceliophthora thermophilia
MASSLIEDVVRKLSAPETEPRVKVEAASALRDSLDHYTTGPGYPIFLKRVMPTFISILRQPCVLQTSTPDQANAQKLRNCVLEIFHRLPTAPSPPEPFEPYAEEVVDLLMQLVRNDNEDNAVLSVKVISDIMRHQHKIMGNKVQAFLSLIQELFEQLDKVVREQLDNTAAPTAPGPPSTPGSTQTTFMPHQQSPRAASPVATGAPDFSADASQQSNRTLLKGMQSFKVLAECPIIVVSIFQVYRSSVAQNVKAFVPLIKQALLCQARAQDQAHKDAAARGTIHTGVSPNIKNRAAFGEFITAQVKTMSFLAYLLRQYSGQLTDFLPSLPEIIVRLLKDCPREKSGARKELLVAIRHIINFNFRKIFIPKIDDLLDERTLIGDGLTVHETMRPLAYSMLADLIHHVRDHLSPEQIRKTVEVYTRNLQDNFPGTSFQTMSAKLLLNMAEFIARMPNKVDARHYLIMILNAIADKFAAMNRQYPNAVKLSKQYAQQAAEGAPETYLPDKEHPPEWDEIDIFNAMPIKASRDRAGDPVVDNKFLFRNLMTGLKNTFYQLKSCNQEGVVDLTHAPAHWKDVAYGFTAEEVKVIIKLFREGAYVFRYYEIEKPAAESPYSSPVEYMANFYMISSSKEEKELLETFATVFHCIDPATFHEVFQQEIPRLYDMIHEHTALLHIPQFFLASEATSPSFCGMLLRFLMERIEDVGSADIKKSSILLRLFKLAFMAVTLFASQNEQVLLPHVVDIVTKSIELSTKAEEPMNYFLLLRSLFRSIGGGKFEHLYKQILPLLEMLLDVLNNLLLAARKPAERDLYVELCLTVPARLSNLLPHLSFLMRPLVVALRAGTDLVGQGLRTLELCVDNLTADYLDPIMAPVIDELMTALFDHLKPHPYSHFHAHTTLRILGKLGGRNRKFMTDALPVTFQQYVDDRSSFDVRLIGSKRDRAFPAHLGIELAIQKLMEVPKPVKGQLPSPAKQYDPYYKRQALNLIIAQVKLRVGYENLPDDLPRLVRLQAQDLINRNKDVDISVFETSERERSMAKKHDEENLLKRLLKALLYAQSIPDFKAEVDALLLNLARHFTIIEVGRALIEMKKAYSPFDTKLGEGPLFVDNRVLSDAILESLASENPDIRDAAERLIKEMYNSAVIIFGSPSHVARLSFFNSLAATFCHGCYEEEWFTKTGGTLGIKALLTEVELGDLWVAAKQIEFVRALMYVIKDMPQDLPEKTRRSAQVTLEILLTRLTKNVKKADCIFAPPAAGIQPPQPPPKPSRIAQIVMMLNGELSHMNRHVRDTARRSLELIAKAAGAEVWELLEPHRKHLLQPIYAKPLRALPFAIQIGFIDAVTYYMSLKRGFVAFDENLNRLLMESLALADASDESLAGKMLEFRTHNFIVNLRVACIKILSSAMSFDEFGSGPNNPTRLKVVSVFFKCLYSDSQSTIEAANDALRTVLQMTSKLPKDLLQSGLRPVLASLQDAKRLTVHSLDNLGRLLRLLTTYFKVEIGARLLEHVKLIAEPNFLQQVSFTFFEQHNSLKVIAAVFNIFHLLPDAAKQFKERVIDNVLDLEEKLRRTHHSPFRLPLYKYLNKYPSDVWAFTLGKLEELRYGRFLSQVLRHPDSQVLRDYGAANVEFIIRTCNNIVTQGKETKFIAIVNTINMLDALCQFPGTLSWLDNKEHIDWLKQVGKELERNLKANSLPPVLRLPAHQASEQLMTILTKALGRNPGDLDSLFALIEGITADDFRETPAVLSHIYKHIICSDSIDFWKTTVLRCLDIYAGKSASQRTKWYLLHNIVNPIVAMDVMRHWNRGEPGRGPRFLDKAIIDSINTKIWKVNLPDPQEDLLQPRIDHTRMEVLQLSAMIVKYHHTVLHDARKDFIKFGWTYIRLDDVINKHAAYVVIGYFIAHHETPAKIVTQIYFSLLKTNQNEGRALVTQALELMAPVMPKRCNTALTDRNPVWAVAPRRILAEESQNVQQMTCIFHFLVRHPDLFYHTRDKFAMLIIQCLRKVASPPNPSNESRKLALNMMWLIWQWEERRVEGKMSEPLRAASESPNTKKRKLEDQQASSPSAVRQPEKAEFQIPAVGRQKMIKYLVEFIAQLNERYPLPSAKPRDPALPVLPSQAPDLCKKAMTLLYNLLQPQYWGDLDVDLFPNVTDVVLASEKSASLLAADPSDTDKVDDKFITNIINTLQVVRIILNFKSNEWILKNMPQIQKILEKCLRSENPEIQDCLHVADREYDGDRDIKPIVKRILDAVPEDVPMEDADADGESETQTSEIITFFSSIATESMAASNYVSGINLLWSLGSRKPSAIDQHIPSIMKSLQSKLARDHVSHYAALAHQASGMRAQQDPNAPTEMNPYDLEIQTNLILKAIEVTAMRMDILGDNRRPFLSVLATIVEKSLHVRLCERILEMVEGWVFRSEGTWPTLKEKTAVLHKMISFEHRQDPHMLMKFLRLVLRIYEDPKITRTELTVRMEHAFLIGTRALDVEMRNKFMTIFDKCLSKTASARLAYVILGQNWDTLADSYWLAQASQLLLGGVDMSPVIQLHHEDFRTLQLSQLFGPYTKDNREPTLISDDKYESFMANHRRFMAELGDVRVRDILEPITQLQHIDPNFANELWVTLFPMFWSATAKEDRPDLERGLVALLTKDYHSRQMDKRPNVVQSLLTGAVRTWPHCKIPPHVLKFEAKTYDAWYTALYQLENSAIKPEIDSATVRESNLDALVDLYASLGEDDLFYGTWRRRCQFVETNAALSYEQHGMWEKAQRMYETAQIKARTGVIPFSESEYMLWEDHWVLCAQKLQQWEILQDFAKHENFQDLLLECAWRNPEYWQNQENRDQLDTLIKGVMDAPTPRRSFFQAFMSLLKLHNKQESMQDFNRVVDEAIQLSIRKWHQLPKRLTAAHIPVLQNFQQLVELHDASVISQSLNSTNANNLDVKSGELKLLLGSWRDRLPNMWDDIVAWQDLVTWRQHIFGLINATYLQLVPAQPQNPGGVSFAYRGYHETAWIINRFAHVARKHALPDVCISQLSRIYTLPNIEIQEAFLKLREQAKCHYQNPDELTSGLDVINNTNLNYFSAPQKAEFYTLKGMFLEKLNQKNEADSAFGTALYFDITAAKAWAEWGYFNDRKFKENPTDLAAAKQALTSYLQAASSYKNHKSRKLIARILWLLSLDDANGTIASGFDDFKGEILVWWWITFIPQLLVGLGHKESPRVQHVLLKIAKTYPQALYFQLRTNREDMLAIKKNQDAKERARRAQAQAAANRPNASPQLTKKDPAAAGNSDSRPATANGDASGQVKTEAKPEGEAANTPKAPPPATNGTAQGEQTGGGGGSGGPQKRPPWELTEEIMSVLKTAFPLLALSMETMVDQIQKHFKCPPDEDAYRLIVALLNDGLAYVSRMPTSYARDVKLPSATENNITRFAETILPSHIRGTFEADFVKVKPTMYEYIHNLRKWRDKFEEKLDRRASPVPLESFAHYSPHLSEFRYQKFDDVEVPGQYLQHKDKNQDFVRIDRFLPNVELVRTIGASHRRLQIRGHDGSVHTFAVQHPAARHCRREERILQLFRQLNQTLASKKESRRRDLQFTLPLMVPLAPHIRIVQEDTTYITLQGVYEDHCRRHGIQKDEPMLYTMEKLRGLADTKGPVSSIRRLSCSVPGQGGLTRHELQKPAEHAATARLEVMRAIQEKFVDNTVALEYFQGTFPDFSEFWLFRRRFSYQLAALTFMTYVLHIDKRYPHKMHIARGSGNIWGSELISFMAANRPYFHNQEPVPFRLTPNLQTLMGPLATEGIFACSVMAIARCLTEPEFQLEHALTLFVRDEMMYWFTSSHRSVALTENQLRETVQANSDMIVKKAVSLAQAPAGNLPAHQTVIDLIAKAVNPMNLAMCDALWMPYL

SEQ ID NO: 5098 - DNA, 594 bp, Myceliophthora thermophilia
atggaagaagcaaaacagcggaaaccgaggggaacgtcagtcaaggcggatggccaacaacaacagcaacaacaacaacaacagagagctcggccgattctcgaaccacctgcaaaagctcaacaacccgtcaccatgtcgaccaccgagcggaccttcattgctatcaagcccgatggcgtccagcgtggcctcgttggcaacatcatcagccgcttcgaggctcggggcttcaagctcgtcgctctgaagctcgtcaagcccggcaaggagcacctcgagaagcactatgccgacctgtcgtctaagcccttcttcgccggcctcgtcgagtacatgaacagcggccccatcgtcgctatggtctgggagggtcttgatgccgtcaagaccggccgcgccatgctcggtgccaccaaccccctcgcctctgccccgggcaccatccgcggcgacttctctctccagaccggccgcaacgtctgccacggatctgacagcgtggagaacgccgagaaggaaatcgctctgtggttcaacaaggaggacctcatcagctgggagtctgcccagaaggcttggatctacgagtaa

SEQ ID NO: 5099 - protein, 197 aa, Myceliophthora thermophilia
MEEAKQRKPRGTSVKADGQQQQQQQQQQRARPILEPPAKAQQPVTMSTTERTFIAIKPDGVQRGLVGNIISRFEARGFKLVALKLVKPGKEHLEKHYADLSSKPFFAGLVEYMNSGPIVAMVWEGLDAVKTGRAMLGATNPLASAPGTIRGDFSLQTGRNVCHGSDSVENAEKEIALWFNKEDLISWESAQKAWIYE

SEQ ID NO: 5100 - DNA, 771 bp, Myceliophthora thermophilia
atggccactgctaaggacgtgccctaccatctcatctactggccgggcattcccggccgcggcgagcacatccggctcgtcctcgaagaagccggcgccgcatacagcgacacggcctttaccgagggcggcattggcgaggtgctcgcattcatccagggcgagacgcccgatgacggcatcaaccccccggtcttcgcacccccgatcctcaagcacggtgagcttgtgatcagccagaccccgaacattctacagtacctcggcggccgcctggggctcgtgccggaccccgaaaaggaccgggacggcctctaccgagtcaactcgctggcgctgacggccctggacggcctgagcaacgagccgcacgactgccaccaccccatcgcttcgggcctttattacgaggaccagaagccggagagcaagaggaggagcgaggactacgtcaagaatcggctgcccaggttcctgacctacttcgagcgcgtgctccggtccaggtccagtggcgaaggcccctggctctacggcggaaacctgacgtacgccgacctcgtgctcttccagtgcgtggatggtctcaagttcatgttcccaaaggccatggctaagcttgagcgggaaggggagcacgccaaggtgtttgctcttcaccaagccgtcgcagagcggcctagaattgcggcatatctaaagagcccccggaggcaaaagtactcgaacggcatctatagatactacgaggagctcgacatcgaaccatag

SEQ ID NO: 5101 - protein, 256 aa, Myceliophthora thermophilia
MATAKDVPYHLIYWPGIPGRGEHIRLVLEEAGAAYSDTAFTEGGIGEVLAFIQGETPDDGINPPVFAPPILKHGELVISQTPNILQYLGGRLGLVPDPEKDRDGLYRVNSLALTALDGLSNEPHDCHHPIASGLYYEDQKPESKRRSEDYVKNRLPRFLTYFERVLRSRSSGEGPWLYGGNLTYADLVLFQCVDGLKFMFPKAMAKLEREGEHAKVFALHQAVAERPRIAAYLKSPRRQKYSNGIYRYYEELDIEP

SEQ ID NO: 5102 - DNA, 648 bp, Myceliophthora thermophilia
atggctcgccagcaatcaccatttcgcaccgtcggagaggatggagaggatggagaggaagggaagagaggcagcgaccgctgggtttggttcatcaccggcccaactgcctgcggcaagacaacagttgcgaagtacctcgcggacaagctgggccttagcttcgtggagggcgatgacttccacccccaagccaaccgcgataagatggcgcgtaatgagccgctgacggacgaagaccgtgcggcgtggctagacgccctgcacgagcgcgtcgtcgtctcctccaccgacgcggacgccgacggcgtccccgtgccgcggctaccacatcgcgtggtgacgtgctcggcgctcaagcggcggtaccgcgacgcgctgcgcgggggggatccggtgcggaccgctccggcgagggtgcggttcgtgtttctggacgtgcacgaggaggtgctgcggcagcgggcgcgcgagcggaagggccacttcgccggggagggcttggtcaagagccaggtggaggcgttggagcgaccgggggaggacgaggaggacgtcatcatcgttagagtcgagaacggagagggggtgggagagacggagagggaggtattgaacagggtcgtgcagcagatgggcctggaatga

SEQ ID NO: 5103 - protein, 215 aa, Myceliophthora thermophilia
MARQQSPFRTVGEDGEDGEEGKRGSDRWVWFITGPTACGKTTVAKYLADKLGLSFVEGDDFHPQANRDKMARNEPLTDEDRAAWLDALHERVVVSSTDADADGVPVPRLPHRVVTCSALKRRYRDALRGGDPVRTAPARVRFVFLDVHEEVLRQRARERKGHFAGEGLVKSQVEALERPGEDEEDVIIVRVENGEGVGETEREVLNRVVQQMGLE

SEQ ID NO: 5104 - DNA, 1566 bp, Myceliophthora thermophilia
atgggcaagccacaggttgactacaggttgtacctggtcacagactcaaccccggctatcctcggcgacagggacctcaacgaggttgtcgaggcctcgctcaaggggggtgtcaccatcgtccagctccgcgagaagaagggcgacacggccgaaatcatcgcaaaggcccagaagatgcagcaagtcacgcgcaagtacaatgtgccgttgctcatcaacgaccgcgtcgacgtggctctcgccgtcgactgtgagggcgtccacatcggacaggacgacatggagctgtccaccgcaagaaatctcctagggccggacaagatcatcggagtcacggtcagcaccgttgaggaagcactcaaggcatgtgaaggcggtgctgactatctcggcattggcaccgtctatgccacagcgacaaagaccaacaccaaagatatcattggaaccgctggcgtgcgcgagatcctcagaaggatcgctgaagcagggtataacacgccggcggtctgcattggcggcatcaacgcgtccaacttacagcgcgtgttgtaccagtgtgccgccccgaataaggttctgaacggcgtcgcaattgtgagcgctatcatggcggctgccgatccagaagctgccaccaagaacctcgctgccctgtcaagaggtcctccagcctttacactggacaccagccgagatctgtcggctgatgctgacggcaaagccgtgattgccctggcagcacccgtcattcgaagaattcacgacaccacgcccctgtctcataacatgaccaacctcgttgtgcaaaactttgcagccaacgtggccctggccgtcggcgcatcgcccatcatggccggctacggcgaggaggctgcagatttgtgcaagcttggaggggctctagtcatcaatatgggatcagttgaccccagtgggctggcaaactacgtgaaggcactcaaggcgtacaatctggaaggacggcccgtcgtgtttgaccccgtgggtgccggtgcaacctcccttcgacgcgaagccgtcaagatgatcatggccaacggctacctcgacgtgataaagggaaacgagggcgaaatcaagacggtgtttggcaacagcaaggagcagcaacggggcgttgacagcacgagcacattagatgcctcacagaaggccaaactagtacgggaacttgcgagtcgcgagaaaaacgtggtccttatgacgggcaagacggattttgttagcgacggcgttcgaacatacgccattgacaacggccacgagtatctcggcatggtgacgggcacgggctgtacgctgggcacagccatctcggccgcgattgcatcgcgccagacggataggcttgcggccgttgttgcggctatcctgcactttgagattgcggccgagctcgctgccgaacggcccgaagtcagggggccgggaacttttgtcccggccttcttggacgagctgtatctcatcaggcaagccacagcacgcaacgacttagcctggcttgcgagagcgaaagtccgcggtgttgagtag

SEQ ID NO: 5105 - protein, 521 aa, Myceliophthora thermophilia
MGKPQVDYRLYLVTDSTPAILGDRDLNEVVEASLKGGVTIVQLREKKGDTAEIIAKAQKMQQVTRKYNVPLLINDRVDVALAVDCEGVHIGQDDMELSTARNLLGPDKIIGVTVSTVEEALKACEGGADYLGIGTVYATATKTNTKDIIGTAGVREILRRIAEAGYNTPAVCIGGINASNLQRVLYQCAAPNKVLNGVAIVSAIMAAADPEAATKNLAALSRGPPAFTLDTSRDLSADADGKAVIALAAPVIRRIHDTTPLSHNMTNLVVQNFAANVALAVGASPIMAGYGEEAADLCKLGGALVINMGSVDPSGLANYVKALKAYNLEGRPVVFDPVGAGATSLRREAVKMIMANGYLDVIKGNEGEIKTVFGNSKEQQRGVDSTSTLDASQKAKLVRELASREKNVVLMTGKTDFVSDGVRTYAIDNGHEYLGMVTGTGCTLGTAISAAIASRQTDRLAAVVAAILHFEIAAELAAERPEVRGPGTFVPAFLDELYLIRQATARNDLAWLARAKVRGVE

SEQ ID NO: 5106 - DNA, 2064 bp, Myceliophthora thermophilia
atggaatgtcttcgcgacaacttccacgatggcgttctgctcaatggtcggtatcggaccatctcccctctcaaccacggctccttcggcatggtcttcatggccaaggacaccttgaccgatcagacagttgccatcaagtgcctgaccaagaagtctgccgcgcccgacgctgacttcgagttcgccatcgacgacaagtcggaagagctcgccctgcacggccgactcggctcgcacccaaacattgtcaacctcaatgactcgttcgagacggatgcgcacgtctacctggtcttggagttctgctcgcgcggcgacttgtacgaggcgatccgcagcggccacggtcccctggagacggaacatgtgagacgcttcatgctggagcttgtcgacgcggttgagtacatgcactccaagggcgtctaccaccgcgatatcaagccggagaacatcttcctgacccagtcggggtccatgaagctgggcgacttcgggctggcaacgacggatgagtggagctacgagacgacagttggcagcgaccgctacatgtccccggagcagtatgactcagccggtgctgggtactcgccggctcaggctgacatctgggccatcgggatctgcctcctcaacatcctgttctcgaggaacccgttcaccacgcccacggaggcggaccctctgttcctcgacttctcacgcgacaagcagtctctgttcgacgtgttcccgtccatgtcgcaggacaccttcgaggttatcgtgcagtgcatgaacctcgatcccaccaagcgctccctggccggagcccgtgacgccttgcttcgcgtcgtcagcttcaccactctggatgaggttctcgacgacttctgctccaccgaccgtcgcgtcgttgccagctccaaccgcgagcccctccgcacgccctcgattcagagtccgcaggtcgacaacggcgccttcccgtgggccaaggccctgcaggcgacgcccccaaagcctatccggcagctcagcgctattcccgacgacgagatctacgaggaagacttgttctcgaagtcgggtgcgacggcggattggatgtcggctacggcacagacgccctccatggcgtcgtatatggactcgaaccttggcacgtcggcgcaatccttcgcgctgccgtccgacttccgtccggtcctgccagcgaaggctaccgcaaagtcggacgcccctgttgccggctccctgcccatcaccatgtccaagaaccgcgatcagtcgaccatgtcgctcttgttcgggcgcaaggatgccgtgtccaagagctggagcgatttgtgggacgaggagttcgaggaagaggagcaggctaggcagctgcaggcgcgcaaggagatgaactcgaggacctggagccacgagagcgctgccgcagcgtctttggccgcggacaatgacgacacgcctcgacaaggcctgtcgcccgctaccaagacggctaccgttgccaacgacgagaacaagatcccgtctatcgatggggccttgaatcacgccgacgaggactcggacgtagacggcctgttcctctacgaggctcccccggctaaggaggagcctcagccccagcttccgcggaacacggcactctcatcacgacgcaccgacttcgacaagtgggcagcccttggcgagcgccgacgggcacatgggagcagcccacctcgcaaggtcgtcaatgtctctctccgcacgggacgtccggtcgagcccaccctcccggcaagctcttcggcaaagggacgagggccgttcaacaacagtcatgccgactctcatcatcaacctttttcttctgtttctgggaaccactcaactcaccacaataacaaccattatcattaccaccatggaaggtggagcaacaaccgagatcgcgccaaggagtgcccgcggcacaagggccgcgaccgagattggaattggaacttcgattggcgcaaagagaagcgccctggcttcggctacctcgagtgggttggtaactggcaggcggccagatcctaa

SEQ ID NO: 5107 - protein, 687 aa, Myceliophthora thermophilia
MECLRDNFHDGVLLNGRYRTISPLNHGSFGMVFMAKDTLTDQTVAIKCLTKKSAAPDADFEFAIDDKSEELALHGRLGSHPNIVNLNDSFETDAHVYLVLEFCSRGDLYEAIRSGHGPLETEHVRRFMLELVDAVEYMHSKGVYHRDIKPENIFLTQSGSMKLGDFGLATTDEWSYETTVGSDRYMSPEQYDSAGAGYSPAQADIWAIGICLLNILFSRNPFTTPTEADPLFLDFSRDKQSLFDVFPSMSQDTFEVIVQCMNLDPTKRSLAGARDALLRVVSFTTLDEVLDDFCSTDRRVVASSNREPLRTPSIQSPQVDNGAFPWAKALQATPPKPIRQLSAIPDDEIYEEDLFSKSGATADWMSATAQTPSMASYMDSNLGTSAQSFALPSDFRPVLPAKATAKSDAPVAGSLPITMSKNRDQSTMSLLFGRKDAVSKSWSDLWDEEFEEEEQARQLQARKEMNSRTWSHESAAAASLAADNDDTPRQGLSPATKTATVANDENKIPSIDGALNHADEDSDVDGLFLYEAPPAKEEPQPQLPRNTALSSRRTDFDKWAALGERRRAHGSSPPRKVVNVSLRTGRPVEPTLPASSSAKGRGPFNNSHADSHHQPFSSVSGNHSTHHNNNHYHYHHGRWSNNRDRAKECPRHKGRDRDWNWNFDWRKEKRPGFGYLEWVGNWQAARS

SEQ ID NO: 5108 - DNA, 2394 bp, Myceliophthora thermophilia
atgggcgaccccggtgacggatggcaaaccgtgatgccgacatcccacgccgggataaagcggctcccttattcgcaattggaggaattcgagctcaagatcctgcgcgactgggaagcctcgggacaccaccggcactggtccggcataggcaaacacctgccggtgaacgatctcgccgaagctaaaaagttccacgatcggttcaagctcgattgcgacaccccactcggctggggaagttttggcgttgtccagaaagtcaagttccactgcaacaaccggtcaatatgcctggcgcgcaaagaggtccggccgccataccgcaggtatcccatggacaaactgcgcgaagaggcccatgtgatggagaatctggatcacgaccatatcgtgaagctggtcgggacgtactgcattcagagcagtctctactttctcttgtggcctgtcgctgtctgcaatctcgatatcctgcttaacgacatagactgcctgaggacaaatcatggcgatcgcgaggacatcatcagcaggctgcatgcgctggacctcaaagatctgagtgccattgaaggaccggcgcccgccgtgcgaaaccctgccggtcgggatagctgcccgctcgagtacctccgccaagtcatgggctgtatcacgagggctgttgcgtactgccacggctctaatgttcggcacctggatctcaaaccttccaatattcttctgaacccaggccgcgtctacctcgccgactttggcattgcaaaagatgtccacgatcgggacaacaccatgacaatcggggtccaagggacgccaaaatggagggccccagaggtgcaacagcacaatgctgactggtccatgaaggcagctgatgtctactctctcgggttaatattgctcaacatcttcaccgtcatctacaacgcacctttgaacgagttcgaagccatattggaagacgtctccgcggacggcagagccatgaaactcgacgagtatctgccgaagctcgagcgcctggtactggcttcgcgggaagtggatgatgctaacgcggcgacgttcagcccgaaacacatcatcggcctcgctgctcgaatggtgtcccaggatccatcctcacggccggtcatcttccaagtcgattcggagctcgttgagcttggcggcctcgaccagatctaccactccaaatgctgcaaacggagcagtcggtatctgacagagcgcatgaacgccaagctcatagccgtgacagaggagcgagaccgattgcgagcggagcatggccaaatggccaaacgcctacagatccttgaagctaaggacgaaacatatgagcaccgcctgcggaacgagcggaaagcccatgccgataacctagtcaaattgcaagctcagctggacaaggagcgggcggagcggcagagactggaaaccctccttgccgaaatgcagcaaagccgaaagcaacaccgtcctgttctcccccggccatccgccgtccgtcaacccacctccggcacttccggcacctccagtccccaagcgcaaccaaaaccgcaactgcccgctcatgccgttcctcaacagcgaccacaggcgacccccggtgcagcaaccgcgtcctgcaccatcagcgccgccactccccaagctgcaacggtgaccgcaaagcctagacgcgactcgctcatcccatcgccttctccaagcgccattcccccccacagctcaaatcccgaccaaccaggtttcccgctccggtcccgtaactctggctcgcggcttccccgtgctatcaatcccaccacgcccatccgctccaacacacccgtcctcaacggcgatctctcgtcgactgacagcacccagtacagcatgagcgactccgtcttcagccgtttgagcttgtccaaggcctcgctcgccgggaccagcgtcgccggaacaccctcaacccacagcccggccatggtggacacacagaaagctgcaaaccagaacgcgtcaccctcgagtccgcgccacggagaaccgggtcaacattcgccgttatcgcccgaggagcctccgcacggtctggggctgggccttactgacctggagcggcgggagagtattgccagtgctggcacgggaggaggcggagacgagagtgtacgggatacggcgagcgtgatcagttcttcggcggcggccgctgctgccgctgctactccctcatcgccgcgggcgctaagttcggcgccgagcggatcggtgctgtcatcgccgaggacgacgcatgcttccatggaggctaccgtgcgagcgggcgtgagggtgccacggttgccgacggctcagagctgggctgaggttgctgccgggaaacaaaggtag

SEQ ID NO: 5109 - protein, 797 aa, Myceliophthora thermophilia
MGDPGDGWQTVMPTSHAGIKRLPYSQLEEFELKILRDWEASGHHRHWSGIGKHLPVNDLAEAKKFHDRFKLDCDTPLGWGSFGVVQKVKFHCNNRSICLARKEVRPPYRRYPMDKLREEAHVMENLDHDHIVKLVGTYCIQSSLYFLLWPVAVCNLDILLNDIDCLRTNHGDREDIISRLHALDLKDLSAIEGPAPAVRNPAGRDSCPLEYLRQVMGCITRAVAYCHGSNVRHLDLKPSNILLNPGRVYLADFGIAKDVHDRDNTMTIGVQGTPKWRAPEVQQHNADWSMKAADVYSLGLILLNIFTVIYNAPLNEFEAILEDVSADGRAMKLDEYLPKLERLVLASREVDDANAATFSPKHIIGLAARMVSQDPSSRPVIFQVDSELVELGGLDQIYHSKCCKRSSRYLTERMNAKLIAVTEERDRLRAEHGQMAKRLQILEAKDETYEHRLRNERKAHADNLVKLQAQLDKERAERQRLETLLAEMQQSRKQHRPVLPRPSAVRQPTSGTSGTSSPQAQPKPQLPAHAVPQQRPQATPGAATASCTISAATPQAATVTAKPRRDSLIPSPSPSAIPPHSSNPDQPGFPLRSRNSGSRLPRAINPTTPIRSNTPVLNGDLSSTDSTQYSMSDSVFSRLSLSKASLAGTSVAGTPSTHSPAMVDTQKAANQNASPSSPRHGEPGQHSPLSPEEPPHGLGLGLTDLERRESIASAGTGGGGDESVRDTASVISSSAAAAAAAATPSSPRALSSAPSGSVLSSPRTTHASMEATVRAGVRVPRLPTAQSWAEVAAGKQR

SEQ ID NO: 5110 - DNA, 879 bp, Myceliophthora thermophilia
atgggcacgcccccagccaatcccaggaccccggtcactatttcaaaactcaagagcatgcacaagaacggtgagccgatcaccatgatcacggctcacgacttccctagcgcccacgtcgccgatgctgccggggtggacgtcatcctggttggcgacagcctggccatggtagccttgggcatggaagataccagtgaagtgatggttgaagaaatgctactgcactgccggtccgttgcacgtgcgactaaggctgctttcaccatcggcgaccttcccatgggttcttatgagatcgccccagctcaagcactcgagacagccatccgcttcaaaaaggagggccgcatgcagggggtgaaactagagggtggcaaagaaatggtacccacgatcgagaagatcgtgggcgtcggcatacccgttctgggccatgtcggcttgacaccccaacggcgggatatcctcggcggtttccgcgtccagggcaaaacagcggcctccgcagccaaaattctcgacgatgccctcgcgcttcaggcagctggctgctttgcgatcgtcgtcgaagccgttccagccgaagttgcctccttcatcacgcaaaagctgtccattccgaccatcgggattggcgccggaaatggctgctccggtcaagtgctggttcaggtcgacatgacgggcaacttcccgcctggcaggcgcatccccaaatttgtcaagcagtacggtaacgtctggtcagagagcttccgggctatcgagacgtatcgggatgaggtcagaagccggcaataccccgctccggagcacacgtatgagatgccccggcaggaatttgaacggttcgttgagaccgccaaggacgtgtga

SEQ ID NO: 5111 - protein, 292 aa, Myceliophthora thermophilia
MGTPPANPRTPVTISKLKSMHKNGEPITMITAHDFPSAHVADAAGVDVILVGDSLAMVALGMEDTSEVMVEEMLLHCRSVARATKAAFTIGDLPMGSYEIAPAQALETAIRFKKEGRMQGVKLEGGKEMVPTIEKIVGVGIPVLGHVGLTPQRRDILGGFRVQGKTAASAAKILDDALALQAAGCFAIVVEAVPAEVASFITQKLSIPTIGIGAGNGCSGQVLVQVDMTGNFPPGRRIPKFVKQYGNVWSESFRAIETYRDEVRSRQYPAPEHTYEMPRQEFERFVETAKDV

SEQ ID NO: 5112 - DNA, 1206 bp, Myceliophthora thermophilia
atgtcctcgccagccaagaacgagagcaacagccccgctccggccgaagagaagccggccgagacgaagccggccgagacgaagcaggccgaagagaagccggccgaagagaagccggcagagacgaagaaggccgaatcaacgcctgccgccgccgcatcaccggccgccgcatcaccggccgaggcatcctcgagcgcccaagcgcagacgtcggccgagtccggcgctcagggcggcattctccccggccagcactggacacagcagccgatcaatgacgccgactcgagctacgacagcgatattgccagctcgaccaactcgctcacctcgagcattctagcctaccgtaccatcagcgggaggaccttccacagcgataggacgccggccgaatactggggcccgaacgatgagaagcagaccgagtgcatggatatccagcaccatgcgttcaccctcctcctggacggcgccctctacagggcgccgctggaagtagacaagatccagaaggttctggatgtcgggacaggaacgggaatttgggcgatcgacttcgccgacgagcaccccaacgtcgaggtgatcggcaccgacatctcgccgatccagcccggctgggtgccgcccaacgtcttcttcgagatggaggatgcgacgcaggcgtggaccttcgccgagaactcgttcgactttgtccacatgcgctacctctacggctccatcgtcgactggaaccagctcttccgcgaggcctaccgcgtcctcaagccgggcggctacatcgagaccttggaggccgactccgccatctactccgacgacggcaccatcaaggagggctcccccatggaccagtggggtaaggtctttgaagagggtggcaggaagtttggcaggaccttcatgcccgtgagcgagaatgtccagcgcaccggcctcgaggcagccgggtttgtcaacctggtccccctcaccgcctggcctgccgacaagaagctagcagagatcggcgcttactgccacctctcaatagagcaggatgtggaaggcctgattctgtacacgttccagcatatcatgggctggtcctcagtcgaggtccatgcctacgtcgcccaccttcgcaggcagatgcgcgacaagaccgtgcaccccatcgggaaactgcggctgatctacgcccagaagcccctctga

SEQ ID NO: 5113 - protein, 401 aa, Myceliophthora thermophilia
MSSPAKNESNSPAPAEEKPAETKPAETKQAEEKPAEEKPAETKKAESTPAAAASPAAASPAEASSSAQAQTSAESGAQGGILPGQHWTQQPINDADSSYDSDIASSTNSLTSSILAYRTISGRTFHSDRTPAEYWGPNDEKQTECMDIQHHAFTLLLDGALYRAPLEVDKIQKVLDVGTGTGIWAIDFADEHPNVEVIGTDISPIQPGWVPPNVFFEMEDATQAWTFAENSFDFVHMRYLYGSIVDWNQLFREAYRVLKPGGYIETLEADSAIYSDDGTIKEGSPMDQWGKVFEEGGRKFGRTFMPVSENVQRTGLEAAGFVNLVPLTAWPADKKLAEIGAYCHLSIEQDVEGLILYTFQHIMGWSSVEVHAYVAHLRRQMRDKTVHPIGKLRLIYAQKPL

SEQ ID NO: 5114 - DNA, 1569 bp, Myceliophthora thermophilia
atgccgtcggcggccatgtgcatgaggacgctgcgggcgtacgccaagtacggccagaatcatgcggccctcttcgcgcgggccttctcggccacagcccgccgccgcgagatcaacaagatctacccctcggcggccgaggcgatcaaggacatgaagcccaactcgacgctcctgtgcggcgggttcggcctctgtggcgtgccagacacgctcatcgacgaggtgctcaagcggcccgatcttaccggtctcacggctgtctccaacaatgccggcacagacaacagcggtctcggcaaactgctgcggaccaagcagatcaagaagatgatcgcctcgtacattggcgagaacaagacgttcgagagcatgtacctcacgggcgaggtcgagctggagctgaccccacagggcacgctggccgagcgctgcgccgcgggcggcaagggcatcccggccttctacactcccgctgccttcggcaccgtcgtccagacgggcgagctgccgctgcgcaacaagcccgacggcacgcccgaccaattctcgtaccccaaggatgtcaaggtattcaacggcaagagctacctgctggagcacgcgatcgagggcgactacgcctttgtcaaggcctacaaggccgaccgcctcggtaactgccaattccgcctggccgccaacaacttcaacggcgccatgggccggaatgccaagatgaccattgtcgaggccgagcacatcgtcgagcccggcgagatccctcccgaggcggtccacctgcccggcatctacgtcaagcgcgtgatccagagcacggccccgaagaacattgagaagtacacgtggagcaaggatccgtccgaggctgaggacccgaaggcggccgccgcactcggcacgggcgacaccaaggccaagcgcgagcgcatcgtgcggcgcgcggccaaggagttccagaacggcatgtacgccaacctgggcatcggcatgcccatgctcgcgcccgggttcgtcggcgacgacgtcgaggtgatgctgcagagcgagaacggtatcctcgggctcggcccctacccgcgcaagggcgaggaggacgccgacctgatcaacgcgggcaaggagacggtcacgctcaagccgggcgcctccgtcttcgggtccgaggagagcttcggcatgatccgcagcggccgcatcaacctgaccatcctgggcgccatgcaggtcagcgccaacggcgacctggccaactggatgctgcccggcaaggtcaagggcttcggcggcgccatggacctcgtcagcaaccccagcgagaccaaggtggttgtcacgatggagcacacggataagaaggggaaccccaagatcgtcaagcaatgcgccttcccgctgacgggcaaggcatgcgtgtcgaggatcatcaccgaactgggtgtctttgatgtcgactttgcaaaagggctcacgctggtcgagatcgcggatggtgtgacagtggaggagatcaaagccaagacggaggcgcctttccgggtggccgatgacttgaagcccatgctctaa

SEQ ID NO: 5115 - protein, 522 aa, Myceliophthora thermophilia
MPSAAMCMRTLRAYAKYGQNHAALFARAFSATARRREINKIYPSAAEAIKDMKPNSTLLCGGFGLCGVPDTLIDEVLKRPDLTGLTAVSNNAGTDNSGLGKLLRTKQIKKMIASYIGENKTFESMYLTGEVELELTPQGTLAERCAAGGKGIPAFYTPAAFGTVVQTGELPLRNKPDGTPDQFSYPKDVKVFNGKSYLLEHAIEGDYAFVKAYKADRLGNCQFRLAANNFNGAMGRNAKMTIVEAEHIVEPGEIPPEAVHLPGIYVKRVIQSTAPKNIEKYTWSKDPSEAEDPKAAAALGTGDTKAKRERIVRRAAKEFQNGMYANLGIGMPMLAPGFVGDDVEVMLQSENGILGLGPYPRKGEEDADLINAGKETVTLKPGASVFGSEESFGMIRSGRINLTILGAMQVSANGDLANWMLPGKVKGFGGAMDLVSNPSETKVVVTMEHTDKKGNPKIVKQCAFPLTGKACVSRIITELGVFDVDFAKGLTLVEIADGVTVEEIKAKTEAPFRVADDLKPML

SEQ ID NO: 5116 - DNA, 1629 bp, Myceliophthora thermophilia
atgacgacggcaacggtgcaggtcaaccaccaccagaaggtggtggaccaggacctcgaggagaagctggggcaggatgccatcttgcaggcgaagcaggcgaccgacgaggagcacgcccagacgttgatgcaggcactgcgggagaatcgaaaggccgtcttgtggtccgtcctgatctcgctgtcgattattatggaaggttacgataccattctcatgggcaatttctttgcctaccccgagttcgccaagaagttcggacactactatggagaagaggacggttggcaggtctcggctccgtggcagacggggttgaacatggccagcaccgtcggtggcatctttggaggtctcttgaacggatactttgcgtccaagttcggctaccgctggtctatgatcggagccatggggttcctgaacgcattcatctttgtcgtcttcttcgcgcccaacgctgccactttggtgggcggccagatcttgtgcggattgtgctggggcgtctttgccactctcagtcccgcatatgcctccgaggtgtgcccgaccaacctgcgcggctacctgaccacgtacgtgaacctgtgctgggccatcggccagctcctggccagcggcgttctccgaggctgcctgcccatcgtcggcgagatggcgtacaagatcccctttgcgctccagtgggcgtggccgctgcccatcatggtgattgcctacttcgcccccgagagcccctggtacctcgtccggacggaccggctcgacgaggccaggaagtcgatcgagcggctcagcggcgacaagacggacgaccagatcggcgcgcagctggccatgatggtgcacacgaccaagctcgagtccgaggtgaccaagggggccacctatctcgactgcttccgcggcgtcgacctgcgccgcaccgagatctgcatgctcaccttcatgggccagatcctctcgggaagcagcttcgcctacacgccgacctacttcttcaccaccgccggcatggagacgtacaacgcttttaatctcggcctcggtgccaaggggatggggtttctgggtaccgtcctctcctggtggctcatcacctactttggccgccggacgctctacgtgaccggcatggggatcctctcgaccgtgctgttcgtcatcggcatcctcgacgtctcggccgggcgccggggcctgtggccgtcgggcgggctgtgcatcttctggctcttcacctactcgctcaccgtcggcccgctggcgtacagcatcatctcggagacgtcgagcgtgcggctgcggccgctcaccgtcgtgctcgcgcgcaccgcctaccaggtcgccaacatcgtctcccaggtgctctacagctacatgcagaactcgaccgcctgggacctccgcggcaagtcgggcttcttctggggcggcaccgcattcctcaccttcgtctgggccttcttccgcctgcccgagatcaagggccgcacctacgaggagctcgacatcctcttcgccaaccgtaccccggcccgcaagttcgccacctcccacgtcgacgcctacgcgctgtctgtcccgcccgccgctgagaaacatgcccacgccgaaaagtga

SEQ ID NO: 5117 - protein, 542 aa, Myceliophthora thermophilia
MTTATVQVNHHQKVVDQDLEEKLGQDAILQAKQATDEEHAQTLMQALRENRKAVLWSVLISLSIIMEGYDTILMGNFFAYPEFAKKFGHYYGEEDGWQVSAPWQTGLNMASTVGGIFGGLLNGYFASKFGYRWSMIGAMGFLNAFIFVVFFAPNAATLVGGQILCGLCWGVFATLSPAYASEVCPTNLRGYLTTYVNLCWAIGQLLASGVLRGCLPIVGEMAYKIPFALQWAWPLPIMVIAYFAPESPWYLVRTDRLDEARKSIERLSGDKTDDQIGAQLAMMVHTTKLESEVTKGATYLDCFRGVDLRRTEICMLTFMGQILSGSSFAYTPTYFFTTAGMETYNAFNLGLGAKGMGFLGTVLSWWLITYFGRRTLYVTGMGILSTVLFVIGILDVSAGRRGLWPSGGLCIFWLFTYSLTVGPLAYSIISETSSVRLRPLTVVLARTAYQVANIVSQVLYSYMQNSTAWDLRGKSGFFWGGTAFLTFVWAFFRLPEIKGRTYEELDILFANRTPARKFATSHVDAYALSVPPAAEKHAHAEK

SEQ ID NO: 5118 - DNA, 1737 bp, Myceliophthora thermophilia
atggcgtcatacaatgcctaccgcaacaggatgcaagcgtttagggaagctggcaacagtgggcgctggaacccgtttgcccataaccgcagcaaaagcctgacactcccacacacttatgatgagaccggcggtgacctcgaaggccagcgacttgggcccgccgctagcgcaccagagccaccaagctcagccggcaacgagagcaaggagacggcagcccatcgcccgcagaccggagagtcgagcgcagagctccgcccatcggagcaagacgcccaggagtcgtcggccaccgtaacccagcccatcctccgccagaggacgtccgccagagatcagtcgtcagatgccacggccgtgcccgccccggagacggagaagccgaagaagaagaagaagaaggaaaggacctttttcaagcacctcacccccaaggagccgttcaccgtcaggaaccagatccaacgaaccctgttcggcggctggatcaacatcctgctgcttgccgcaccggcaggtattgccatcaactacatcccctccgtcagccgggtcgccgtctttgttgtcaatttcattgccatcgtgcccctggcttccctgctcggcttcgccaccgaggagatcgcgctgcggaccggcgagacgataggcggcctgctgaacgccacatttggtaacgcggtcgagctgatcgttgccatcatcgccttggtccacgacgaggtcgtcatcgtccagacctctctgatcggcagcatcctctccaacctgctcctggtcctgggcatgtgcttcttcttcggcggcctccaccgccaggaacagtacttcaacaccaccgtcgcccagaccgccgccagccttctggccctggccgtcgccggcgtcatcgtgcccaccgtcttcgacatttccagcaagacccccacgtctgatgtcgccaagctctcccgcggcacctccgtcatcctcctggtcgtttacggcgcctacctgtttttccaactacacacccactccgccgtcttcgcccaggagtcgcaaaaggtcgaggccaaaccgttcaagaaccccatgcgcagccaggtgctcaaggacggcgccgtcgcccagggctttgtcgcccccgccggcgtcgccggtggctacggtctgccgaccagccgcaccgacaacgagaagatgcgcgacatcctcaccaacccgccgcgcaagagtcttctccaagaaggcgaagaggaggaagacgacgaagccgaggaggaacctcagctccactttgccgtcgcggtcgccctccttaccatctcgaccgtcgtcatcgccttctgcgccgagttcatggtcgacggcatcagcgccgtcacggccggcggcaccgtctcggccgagttcgtcggcctcatcctcttgcccctcgtcggaaacgcggccgagcacgccaccgccgtcaccgtcgccatcaaggacaagatggaccttgccatcggcgtcgccgtcggctccagcatgcaggtcgccctcttcgtcatccccctgctcgtcatcatcggatggggcatgggcatggacgccatggccctcagcttcgaccccttccaggtcgccgttctgttcgtcgccgtgctgttggtcaactatctcatcgccgacggcaagagccattggctcgagggcttgctgttgatatgtctgtattgcatcattgccgtctgctcctggtgtaagtag

SEQ ID NO: 5119 - protein, 578 aa, Myceliophthora thermophilia
MASYNAYRNRMQAFREAGNSGRWNPFAHNRSKSLTLPHTYDETGGDLEGQRLGPAASAPEPPSSAGNESKETAAHRPQTGESSAELRPSEQDAQESSATVTQPILRQRTSARDQSSDATAVPAPETEKPKKKKKKERTFFKHLTPKEPFTVRNQIQRTLFGGWINILLLAAPAGIAINYIPSVSRVAVFVVNFIAIVPLASLLGFATEEIALRTGETIGGLLNATFGNAVELIVAIIALVHDEVVIVQTSLIGSILSNLLLVLGMCFFFGGLHRQEQYFNTTVAQTAASLLALAVAGVIVPTVFDISSKTPTSDVAKLSRGTSVILLVVYGAYLFFQLHTHSAVFAQESQKVEAKPFKNPMRSQVLKDGAVAQGFVAPAGVAGGYGLPTSRTDNEKMRDILTNPPRKSLLQEGEEEEDDEAEEEPQLHFAVAVALLTISTVVIAFCAEFMVDGISAVTAGGTVSAEFVGLILLPLVGNAAEHATAVTVAIKDKMDLAIGVAVGSSMQVALFVIPLLVIIGWGMGMDAMALSFDPFQVAVLFVAVLLVNYLIADGKSHWLEGLLLICLYCIIAVCSWCK

SEQ ID NO: 5120 - DNA, 906 bp, Myceliophthora thermophilia
atgatttccccagaccaagtcaacgagatgctctacccggcttcaaccacctcgaagccggggccgatccccaccgttgtcccaaacccgaccgagtaccagctggcgggtgatgtgggccaccggacgctgtgggtgctcttcgcggccatgaccatcacgacggccgtgttcgcgctgctgtcgtggaacgtgccggtggcgaagcgggtgtaccacgtgacgacgacgctgctggcgctggtgtcggcgctggcctactacgcgatggcgaccggctacgcgtcgtcgctcagctgccgtcccgtgcgcgacagtcacggcgaccaccttcccgacaccttccacgacgcctgccgccaggtctactgggcccgctacctcgactgggccatcgccaactcgctgctcctgctcaacctatgcctcctcgccggcgtcgacggcgcccacaccctcatggctatcgtcgcccacctcgtcaccatcctgggcggcttcgcggccgcctacgccgccgagcgcaccggccagatgtgggggtggttcgtcatcgcctgcctcggctacctcttcgtcgtctggcacgtcggcctgcacggcacccggtcggtcaaggccaagggcgcgcgcgtgtccaagctgtgggcgtcgctgagcatctactcgctcgcggttctggccgcttatccgattgcttgggccatcacgactcttgctcgcaagaccgacgtgaataccgagattatcgtctacgctgtgctggatgccctgaccaagccggtgtttggcctttggttgctcatcagccaccgcgccatccccgagtttaacatcgagattgcgggctggtggtcgcagggctcgtctgccgagggaagaattcgcattagcgacgaagaataa

SEQ ID NO: 5121 - protein, 301 aa, Myceliophthora thermophilia
MISPDQVNEMLYPASTTSKPGPIPTVVPNPTEYQLAGDVGHRTLWVLFAAMTITTAVFALLSWNVPVAKRVYHVTTTLLALVSALAYYAMATGYASSLSCRPVRDSHGDHLPDTFHDACRQVYWARYLDWAIANSLLLLNLCLLAGVDGAHTLMAIVAHLVTILGGFAAAYAAERTGQMWGWFVIACLGYLFVVWHVGLHGTRSVKAKGARVSKLWASLSIYSLAVLAAYPIAWAITTLARKTDVNTEIIVYAVLDALTKPVFGLWLLISHRAIPEFNIEIAGWWSQGSSAEGRIRISDEE

SEQ ID NO: 5122 - DNA, 2847 bp, Myceliophthora thermophilia
atgcctccgtcgctcaacacccacgcttccttctcccgtccgcggactagcgaccgcgatgcccgccccgtcacccgcgaccaggccgacagcaacctgatcattccgagccggacctcgtctcttcattctcgaattacccagccgattccgtcgacgctgaacatgaagccgcagcagaggacgcccaagacgctcactcatgcctacatggtctgcggtgtcggccgcgagccgtcgcaatgggtgaaggcgccgccccctccgcagggaaagattggccacatgaagggtgccgttcctcaattttggctgcccgagatcctggggagcagcccgaggttggagcaagacaatgagatcgccagggctctgcacgctgccatgagggcctgcttccctcacgacgtcgagatttgcaccggccgcacccagcctcactgtgtccatcacgctttcgtcctccaacaggactcgtcccacacgctctacggtatctgcctgcgcgtctggtcgcgcgccgacgagaagcgggccgagacgatccgtgagctcaggaggcggacagagcccgacttctacgacaacccggaggagcagtactggatcccttactgcttatcgttcctctcgcgctacccgctctacaacctgctcggcgactatctccggggcatgtggatccactggaacaaggcgaccaacctcttccacgccgaggaggtctcgcggattctgagcttccctgctcctcgcctgaacgatctggtgcgcatcgacatgaaggactacgcgctctgctaccagttcccctcttcgcccaccggcttccagaacttcgccatgtggccgttgttctgctgcctgtcaatccccaacatcgtcggcgtcatcgaggcggccatctcgcctacccgccgcatcatcttcgtcagccactaccctgccatgctgacaatggctgccgaaactgtccggttctgcgtccgcgtctacgaatggagcggcctctacgtccccgtcgtgcacgcgcgccatgccaaggatctcgtcgaggagcccggcccgtacatcctcggtatcacggccgagtgcaggtcgctcttcacggcgcccagcgacgccctggtcgtcgatctcgaccgcaactttgtcctcacttccaacccgcccaccgccctcacgcccagccagcgcaacaagtttgtgacgaggctgacccaggcgctgaatggcgacgtcacgccctcgggcgtgccccagcaccttcgctcggcctacggcggcggaaagctggttccggccggtcagattatcgttatgcgcggtgaggtcgagtccatccaggaccctgagtggtggaaccaggatgctgtcatggctgtcatggaccacgtctgcgagaagattagccgtaacacgggtctaaaagccgtcttcggcgggtctgtgaagaagccgctgatgacaaaggtctcgatgagacacctcaacgagattgtccgtgagcggaaccagtactcgagagacgcgctcgaggcttggcaggacttcatcaacctcaagggccggctggatacggagctcagcaaggttaccaagaggaataactacctcaacgaggagttggagaactggaagcagcagttccttaaattccaagcttttgccgacactctcacgaaggagacccaggagctcaaggtcaagatcgaggggcacaagcgcgagaaccgccgccttgccgcgctaatcgaccagcagaaggacgatgcaagcaggctctcggcccgtctcgccggcaccgagaagcagcgcgacgatgccctcgaggcgcttgttctgcagcaggagatcgccgaggagctcgagagggagcgcaagaggaacaggaaggagctcagcgctctgcagcacaccaacatgacgattgcccggcagcgcgacgaagcgcgccgcgtcgtgctgcacctccgcagcttgatttcgggacagcaccaccacatggagcacctcgtcaagacactgacgtccccagaggagcttgccgccgagatcgaggccggctttgccgcccaggaggaggcggaagctgccgctatcgccgagcgcgaaggtatggaagagagcgatgcccggttcatcaagaacctcacgctcgcccgcaggcggatttcgacgcagacgttcatcgacgtggcggatcgccacctcaaagacaagacggatgccatcgcgcacatcatccgcaacattgcggagcaatgccaggccgcagtcgagggcctgcaactcgcccaggacgccgagctcgggaggcctcaatcgtcggcttccagggctcgggacttgtcaaaaagtaggagagggagttctctctcagtcgcgcccagcgatgacggtaacgcctcgtccacctcgacggccacgtccgatgtcggtgacgatagcagcagcgtcacgctcctccggccccacagcgggcggacctctagcatcccacccacaccggatctcattcccaaccgcagcagcactagcatgtctttcgcgagcacgacggccacgacccctgagcgaacctcccagcagtacctcctccaacttcacggcgggggaggaaacggacacgggcaacagcagcacgacatccccacgaagattgtcgaggacgacgaggacgtcgatgacctcacccccgacgagcgcgtcgcccgtgacgccgacgagggcaaccccatccccgctccccacccgacggagtcgggcgtcgtgggtaagcagccagagagtctgatccaccggctttcgggcgcgcgcatctcggcgctgggcagctcccgctga

SEQ ID NO: 5123 - protein, 948 aa, Myceliophthora thermophilia
MPPSLNTHASFSRPRTSDRDARPVTRDQADSNLIIPSRTSSLHSRITQPIPSTLNMKPQQRTPKTLTHAYMVCGVGREPSQWVKAPPPPQGKIGHMKGAVPQFWLPEILGSSPRLEQDNEIARALHAAMRACFPHDVEICTGRTQPHCVHHAFVLQQDSSHTLYGICLRVWSRADEKRAETIRELRRRTEPDFYDNPEEQYWIPYCLSFLSRYPLYNLLGDYLRGMWIHWNKATNLFHAEEVSRILSFPAPRLNDLVRIDMKDYALCYQFPSSPTGFQNFAMWPLFCCLSIPNIVGVIEAAISPTRRIIFVSHYPAMLTMAAETVRFCVRVYEWSGLYVPVVHARHAKDLVEEPGPYILGITAECRSLFTAPSDALVVDLDRNFVLTSNPPTALTPSQRNKFVTRLTQALNGDVTPSGVPQHLRSAYGGGKLVPAGQIIVMRGEVESIQDPEWWNQDAVMAVMDHVCEKISRNTGLKAVFGGSVKKPLMTKVSMRHLNEIVRERNQYSRDALEAWQDFINLKGRLDTELSKVTKRNNYLNEELENWKQQFLKFQAFADTLTKETQELKVKIEGHKRENRRLAALIDQQKDDASRLSARLAGTEKQRDDALEALVLQQEIAEELERERKRNRKELSALQHTNMTIARQRDEARRVVLHLRSLISGQHHHMEHLVKTLTSPEELAAEIEAGFAAQEEAEAAAIAEREGMEESDARFIKNLTLARRRISTQTFIDVADRHLKDKTDAIAHIIRNIAEQCQAAVEGLQLAQDAELGRPQSSASRARDLSKSRRGSSLSVAPSDDGNASSTSTATSDVGDDSSSVTLLRPHSGRTSSIPPTPDLIPNRSSTSMSFASTTATTPERTSQQYLLQLHGGGGNGHGQQQHDIPTKIVEDDEDVDDLTPDERVARDADEGNPIPAPHPTESGVVGKQPESLIHRLSGARISALGSSR

SEQ ID NO: 5124 - DNA, 357 bp, Myceliophthora thermophilia
atgtacgcattgcataagaagctcaagaaggaactcgagtttgtcaaaaccagaatgaagaactactacgacaaacataggcttgagggacctcgcctagagaggggagacaaagtctacctgattgcacgaaacctgcgaaccaaacgaccaagtcgacagaccacgcgccaccatatcggcacctttctccaccaaaaactccttctgctgacgaagatgccggagccgcgcaagcttttcggacaactcacgctaggcctcttccagacggcgttaggattcatccagctcaagttcggcacgacgtttagcatctttgatacgacgctgctcctgaagaatgcgatccactag

SEQ ID NO: 5125 - protein, 118 aa, Myceliophthora thermophilia
MYALHKKLKKELEFVKTRMKNYYDKHRLEGPRLERGDKVYLIARNLRTKRPSRQTTRHHIGTFLHQKLLLLTKMPEPRKLFGQLTLGLFQTALGFIQLKFGTTFSIFDTTLLLKNAIH

SEQ ID NO: 5126 - DNA, 261 bp, Myceliophthora thermophilia
atgtacgagaaacttaaaaaggaactcgagtttatcaagaccaggatgaagaactactacgacaaacataggctcgagggaccttgcttagagaggggagacaaagtctacctaatcgtacgaaacttacgaaccaaacgaccaagcacgaagctagactttaagaagacggatgttttttatatttcacttctcgaaccagcaccgaagaacgctaaggttgctacatatatcaaagcagaggataaagaggaaaaatag

SEQ ID NO: 5127 - protein, 86 aa, Myceliophthora thermophilia
MYEKLKKELEFIKTRMKNYYDKHRLEGPCLERGDKVYLIVRNLRTKRPSTKLDFKKTDVFYISLLEPAPKNAKVATYIKAEDKEEK

SEQ ID NO: 5128 - DNA, 216 bp, Myceliophthora thermophilia
atgaaaaactactataacaaatataggctcgagggaccttgcctagagaggggagacaaagtctacctgattacacgaaacctacgaaccaaacgactaagcacgaagctagactttaagaagacggatgttttttatatttcgcttctcgaactagcaccaaaaaacgccaaggttgctacatacatcgaagtagaagacaaagaagaagaatag

SEQ ID NO: 5129 - protein, 71 aa, Myceliophthora thermophilia
MKNYYNKYRLEGPCLERGDKVYLITRNLRTKRLSTKLDFKKTDVFYISLLELAPKNAKVATYIEVEDKEEE

SEQ ID NO: 5130 - DNA, 339 bp, Myceliophthora thermophilia
atgtacgagaaactcaaaaaggaactcgagtttgtcaagatcagaataaagaactactataacaaatataggctcgaaggaccttgcctaaagaggggagacaaagtctacctaatcgcacgaaacttacaaaccaaacgaccaagtacgaagctagactttaagaaggttagacccttcgttattaaagaacaaattttaacatctaactatcgactatcgttatcgtcatctatacgactacggacagatatttttcatatttcacttctcgaaccagcaccgaaaaacaccaaggttgctacgcacatcgaagcagaggacgaagaggaagaatag

SEQ ID NO: 5131 - protein, 112 aa, Myceliophthora thermophilia
MYEKLKKELEFVKIRIKNYYNKYRLEGPCLKRGDKVYLIARNLQTKRPSTKLDFKKVRPFVIKEQILTSNYRLSLSSSIRLRTDIFHISLLEPAPKNTKVATHIEAEDEEEE

SEQ ID NO: 5132 - DNA, 366 bp, Myceliophthora thermophilia
atgacgccgatagaaacgaccaaagtcatactattcttcgcgaactacggatataaagcagaccttaggcaaggactagaggttatagtgccaagagcaatagtcaaagtaaaacaaatgtacgcactatatgaaaagctcaaaaaggaactcgagtttgttaagactagaataaagaactactataacaaacataggctcgagggaccttgcctagagaggggagacaaagtctacctaatcatacgaaacttacgaaccaaacgattaaatacgaagctagactttaagaaggtcggacccttcgttatcaaagaacgaatttcgacatctaactaccgactatcgttactattatctatatga

SEQ ID NO: 5133 - protein, 121 aa, Myceliophthora thermophilia
MTPIETTKVILFFANYGYKADLRQGLEVIVPRAIVKVKQMYALYEKLKKELEFVKTRIKNYYNKHRLEGPCLERGDKVYLIIRNLRTKRLNTKLDFKKVGPFVIKERISTSNYRLSLLLSI

SEQ ID NO: 5134 - DNA, 348 bp, Myceliophthora thermophilia
atgcacgcactatacgagaagctcaaaaacgaacttgagtttgtcagaactagaatgaagaactactacgacaaatacaggctcgagggaccttgcctagagaggggagacaaagtctatctggttgcacgaaacttacgaaccaaacgaccaagcacgaagctggactttaagaaggtcagacccttcgttatcaaagaacaaatctcgacatctaactaccgactatcgttactgtcatctatgcgactacggacggatgttttttatatttcacttctcgaactagtaccaaaaaacgccaaggttgccacgtatatcgaagcagaggacgaagaggaagaatag

SEQ ID NO: 5135 - protein, 115 aa, Myceliophthora thermophilia
MHALYEKLKNELEFVRTRMKNYYDKYRLEGPCLERGDKVYLVARNLRTKRPSTKLDFKKVRPFVIKEQISTSNYRLSLLSSMRLRTDVFYISLLELVPKNAKVATYIEAEDEEEE

SEQ ID NO: 5136 - DNA, 348 bp, Myceliophthora thermophilia
atgtacgtactatataagaagcttaaaaacgaacttgagtttgtcagaaccagaataaagaactactataacaaacataggctcgagggaccttacctagagaggggagacaaagtctacctagttatacaaaacttacaaactaaacgaccaagcacgaagctagacttcaagaagatcagaccctttgttatcaaagaacgaatttcgacatctaactaccgactatcgttaccgtcatctatacgattacagacggatgttttttatattttacttctcgaaccagcgctaaagaacgccaaaatcgctacaaacatcgaagtagaggacgaagagaaagaatag

SEQ ID NO: 5137 - protein, 115 aa, Myceliophthora thermophilia
MYVLYKKLKNELEFVRTRIKNYYNKHRLEGPYLERGDKVYLVIQNLQTKRPSTKLDFKKIRPFVIKERISTSNYRLSLPSSIRLQTDVFYILLLEPALKNAKIATNIEVEDEEKE

SEQ ID NO: 5138 - DNA, 216 bp, Myceliophthora thermophilia
atgaaaaactactacgacaaatataggctcgagggaccttgcctagagaggggagataaagtctacctaattatacgaaacttacaaactaaacgaccaagtacgaagctagactttaagaagacggatgtttttcatatttcacttctcgaaccagtaccaaaaaacgctaaggttgctacgcacatcgaagcagaggatgaagaagaagaatag

SEQ ID NO: 5139 - protein, 71 aa, Myceliophthora thermophilia
MKNYYDKYRLEGPCLERGDKVYLIIRNLQTKRPSTKLDFKKTDVFHISLLEPVPKNAKVATHIEAEDEEEE

SEQ ID NO: 5140 - DNA, 270 bp, Myceliophthora thermophilia
atgtacacggtatacgagaaactcaaaaaggaactcgagtttgtcaagatcagaatgaagaactactacaataaacacaggctcgagggacctcgcctagagaggggagacaaagtctacctaatcgtacgaaacttgcaaaccaaacgaccaagcacgaagctagactttaagaagacggatgttttttatattttacttcttgaactagcaccgaaaaacgccaaggttgctatatatattgaagcagaagacgaagagaaagaatag

SEQ ID NO: 5141 - protein, 89 aa, Myceliophthora thermophilia
MYTVYEKLKKELEFVKIRMKNYYNKHRLEGPRLERGDKVYLIVRNLQTKRPSTKLDFKKTDVFYILLLELAPKNAKVAIYIEAEDEEKE

SEQ ID NO: 5142 - DNA, 270 bp, Myceliophthora thermophilia
atgtacgcactatatgaaaagcttaaaaaggaactcgagtttgtcaagactagaataaagaactactataacaaatataggctcaagggaccttgcctagagaggggagacaaagtctacctaatcatacgaaacttacaaaccaaacgaccaagcacgaagctagacttcaagaagatagatattttttatatttcgcttctcgaaccagtaccgaaaaacgccaaggttgccacgtacatcgaagtaaaagacaaggaagaagaatag

SEQ ID NO: 5143 - protein, 89 aa, Myceliophthora thermophilia
MYALYEKLKKELEFVKTRIKNYYNKYRLKGPCLERGDKVYLIIRNLQTKRPSTKLDFKKIDIFYISLLEPVPKNAKVATYIEVKDKEEE

SEQ ID NO: 5144 - DNA, 348 bp, Myceliophthora thermophilia
atgtacacactatatgagaagcttaaaaaggaactcgagtttgtcagaaccaggataaagaattactataacaaacacaggctcgagggaccttgcctagagaggggagacaaagtctacctggttatacgaaacttacgaaccaaacgaccaagcacaaagctagacttcaagaaggtcggacccttcgttatcaaggaacgaatttcgacatctaactaccgactattgttactgtcatctatacgattacggacggatgttttttatatttcacttcttaaactagtaccaaagaatgctaagaccgctataaacatcgaaacaaaggacaaagaggaagaatag

SEQ ID NO: 5145 - protein, 115 aa, Myceliophthora thermophilia
MYTLYEKLKKELEFVRTRIKNYYNKHRLEGPCLERGDKVYLVIRNLRTKRPSTKLDFKKVGPFVIKERISTSNYRLLLLSSIRLRTDVFYISLLKLVPKNAKTAINIETKDKEEE

SEQ ID NO: 5146 - DNA, 258 bp, Myceliophthora thermophilia
atgtacgtactatatgataagcttaaaaaagaactcgagtttgtcagaactagaataaagaactactataacaaatacaagctcgagggaccttgcctagagaggggagataaagtctacctgatcgtacgaaacctgcgaaccaaacgactaagtacgaagctagactttaaaaggttagacccttcgttatcaaagaacgaatctcgatatctaactaccaactatcattactattatctatacgactacggatag

SEQ ID NO: 5147 - protein, 85 aa, Myceliophthora thermophilia
MYVLYDKLKKELEFVRTRIKNYYNKYKLEGPCLERGDKVYLIVRNLRTKRLSTKLDFKRLDPSLSKNESRYLTTNYHYYYLYDYG

SEQ ID NO: 5148 - DNA, 348 bp, Myceliophthora thermophilia
atgtacacactacacgagaagctcaaaaacgaacttgagtttgtcaagatcagaataaagaactactacgacaaatataggctcgagggacctcgcctagagaggggagacaaagtctatctagttatacgaaacttacaaaccaaacgactaagcacgaagctagacttcaagaaggtcagacccttcgttatcaaagaacgaatttcgacatctaactaccgactatcgttaccgtcatctatgcgattacagacagatattttttatatttcacttctcgaaccagcaccgaagaacgccaaaatcgctataaatatcgaagcagaggataaagaagaagaatag

SEQ ID NO: 5149 - protein, 115 aa, Myceliophthora thermophilia
MYTLHEKLKNELEFVKIRIKNYYDKYRLEGPRLERGDKVYLVIRNLQTKRLSTKLDFKKVRPFVIKERISTSNYRLSLPSSMRLQTDIFYISLLEPAPKNAKIAINIEAEDKEEE

SEQ ID NO: 5150 - DNA, 216 bp, Myceliophthora thermophilia
atgaagaattactacgacaaacataggctcgagggaccttgcctagagagaggagacaaagtctacctaattgtacgaaacctgcgaaccaaacgaccaagcacgaagctagactttaagaagacggatattttttatatttcacttctcgaactagtaccgaaaaacgccaaggttgctatatacattaaagcggaagataaggaagaagaatag

SEQ ID NO: 5151 - protein, 71 aa, Myceliophthora thermophilia
MKNYYDKHRLEGPCLERGDKVYLIVRNLRTKRPSTKLDFKKTDIFYISLLELVPKNAKVAIYIKAEDKEEE

SEQ ID NO: 5152 - DNA, 294 bp, Myceliophthora thermophilia
atgaagaactattataataaatataggctcgagggaccttgcctagagaggggagacaaagtctacctaatcgtacgaaacttacaaaccaaacaactaagtacgaagctagactttaagaaggtcagaccctttgttatcaaggaacgaatttcgatatctaactaccgactatcgttaccgtcatctatgcgattacggacagatattttttatatttcacttcttaaactagtaccaaagaatgctaagactgctataaacattgaagcagaggacgaagaggaagaatag

SEQ ID NO: 5153 - protein, 97 aa, Myceliophthora thermophilia
MKNYYNKYRLEGPCLERGDKVYLIVRNLQTKQLSTKLDFKKVRPFVIKERISISNYRLSLPSSMRLRTDIFYISLLKLVPKNAKTAINIEAEDEEEE

SEQ ID NO: 5154 - DNA, 222 bp, Myceliophthora thermophilia
atgtacgagaaactcaaaaaggaactcgagtttatcaagatcagaataaagaactactacgacaaatacaggctcgagggaccttgcctagagaggggagacaaagtctacctgatcatacgaaacttacaaactaaacaaccaggctacaaacaagcagacgctatgtcagaaccatccgagaagagcctgacgccatacgacaagccaagttccgcttaa

SEQ ID NO: 5155 - protein, 73 aa, Myceliophthora thermophilia
MYEKLKKELEFIKIRIKNYYDKYRLEGPCLERGDKVYLIIRNLQTKQPGYKQADAMSEPSEKSLTPYDKPSSA

SEQ ID NO: 5156 - DNA, 348 bp, Myceliophthora thermophilia
atgcacgcactatacaagaagctcaagaaggaactcaagtttgttaagaccaaaataaagaactactacaataaacacaggctcgagggacctcgcctagagaggggagataaagtctacctgatcgtacgaaacttacgaactaaacgactaagcacaaagctagactttaagaaggtcagaccctttgttatcaaagaacgaatttcgacatctaactaccgactatcgttaccgtcatctatacgactacagacagatgtttttcatatttcacttctcgaaccagcaccaaagaacgccaaggttgctacgcacatcgaagcagaggacgaagaggaagaatag

SEQ ID NO: 5157 - protein, 115 aa, Myceliophthora thermophilia
MHALYKKLKKELKFVKTKIKNYYNKHRLEGPRLERGDKVYLIVRNLRTKRLSTKLDFKKVRPFVIKERISTSNYRLSLPSSIRLQTDVFHISLLEPAPKNAKVATHIEAEDEEEE

SEQ ID NO: 5158 - DNA, 1587 bp, Myceliophthora thermophilia
atgagccgatggatcgccaacgagaccaacctgggcatcactaccagaagacgaaacagaagcttccgcccattatcccaaaaagagaacgaatccgcgccggcgatcctgtctctggttaacagcttgcctgccatggtgggagttcctggccgctccaaggcatgcatcacatgccggaagcgaagaaaagggtgcgacctcgagagacccgcgtgctcccagtgtcgaaaggccgggctgcagtgcgaaggctacagcgcaccgcgcgtcttcgtcatcagcaccccagaacggcggcgcgcaggatacagcgcgcgacgcgactccccttcgaggccggacgcggaccatgctaccgaagccaccaccaccaccaccgtgacgaacctccgcctgctggcgaggcccgaggaggagaggaggtgcatagacctcttctgggaagcctacttcccggcggggcagccgatcccgagggcggcctcgcggagctacgtgtgcgcgtggaccgagacggcccggcgcttctaccgcgacgacgactcgctccgccacgcgctgtgggccaactgcctgctcacgaccggccgccgccacggcgccgcctggatgctgcgcgagggctccagggcgtacggcaaggccctcggcgacctgaggcgctcgctgcaggcctcgtcgcaccgcgtccgcgtggacgtgcccatcgccaccatcaagctgctcgccatgtttgaggctttttcgcagcagggaggcagcgagcccaaggccgaagacgcccagcaacactggcagcgtcattacgccggcgagcttgccttgttcatcgccaggaccccggtggcccatgtcgacggtgaattgcacgacgtctttgccgacgagcgagtggacatggccctgtcggcagtgctgagacgggaacggcttgtcctgagcacgcccgagtggaagaccatcccgtggcaggcaatccctaaggactacaaggacatcctggtggacgccctggtcgacatccccgggctcgtcgaggacttcgacaagatgcgactgtgcgccgaggagccccggcgatcccatctgcggctcgagctcgtccgcaagtgccggatcctcgaccggcagctccagacctgggtcggcctgctgacgcggctcggagccaaggtcgaggagcactcgtgcctggacccgaccggcaaggacctcgtcacccacgtcgcccaggtccacggcatgagcctgtactgggccgcctccctcgtcctctacaccatcctccggctggtctccgggccgcgtgcccgcctgcccgagcacgcggacccggccgagcacgcgcgcaacctcgtcgccgccgtcgccatcctgctcgagccgagctcccggctctacggccagcagaacgccgccctcccgctcgagatcgcatggcagtacgccaacgccctgcggtccgtctccccggacagcgaggcgctcctcggcaccatccgggcgctccggcgccgtctgcacaccggagcggcggccccggtcagcgatggcgcccctatacccgcctcgacgtccggatag

SEQ ID NO: 5159 - protein, 528 aa, Myceliophthora thermophilia
MSRWIANETNLGITTRRRNRSFRPLSQKENESAPAILSLVNSLPAMVGVPGRSKACITCRKRRKGCDLERPACSQCRKAGLQCEGYSAPRVFVISTPERRRAGYSARRDSPSRPDADHATEATTTTTVTNLRLLARPEEERRCIDLFWEAYFPAGQPIPRAASRSYVCAWTETARRFYRDDDSLRHALWANCLLTTGRRHGAAWMLREGSRAYGKALGDLRRSLQASSHRVRVDVPIATIKLLAMFEAFSQQGGSEPKAEDAQQHWQRHYAGELALFIARTPVAHVDGELHDVFADERVDMALSAVLRRERLVLSTPEWKTIPWQAIPKDYKDILVDALVDIPGLVEDFDKMRLCAEEPRRSHLRLELVRKCRILDRQLQTWVGLLTRLGAKVEEHSCLDPTGKDLVTHVAQVHGMSLYWAASLVLYTILRLVSGPRARLPEHADPAEHARNLVAAVAILLEPSSRLYGQQNAALPLEIAWQYANALRSVSPDSEALLGTIRALRRRLHTGAAAPVSDGAPIPASTSG

SEQ ID NO: 5160 - DNA, 315 bp, Myceliophthora thermophilia
atggccacctcgcttcgctccatcaagtcgctcgtcccgctccttgaccgcgtgctcgtgcagcgcatcaaggccgaggcgaagacggcaagcggcatctacctccccgaatcgagcgtcaaggagctcaacgaggccaaggtcctcgctgttggccccggcgcccttgacaaggatggcaagcgcgttcccatgggtgtcgctgccggcgacagggtgttgattcctcagtacggtggttcgcctgtcaaggttggagacgaggaataccaccttttccgggacagcgagatcctggccaagatcaccgagtaa

SEQ ID NO: 5161 - protein, 104 aa, Myceliophthora thermophilia
MATSLRSIKSLVPLLDRVLVQRIKAEAKTASGIYLPESSVKELNEAKVLAVGPGALDKDGKRVPMGVAAGDRVLIPQYGGSPVKVGDEEYHLFRDSEILAKITE

SEQ ID NO: 5162 - DNA, 1881 bp, Myceliophthora thermophilia
atgacactcggcgacatcgaccgcgccatcgaggcggccgagctcgatgcttccgggcgtcgcagcgaagaaatcgaacgggtggtctcggcatcatccgtatcaagctcctcctcttcaggggcgtcgcgcccagggatgagccgggtcgagacacagcgggacctggagcgcgaccccacggagctgagtcggatccagaccgcccggagccagcacagtgggacggtagggcgggccaagagcaaggagtggaagaagccgctgcccaactttggcgccggcaagccctacccaccactgctgccgaaccaggaggactacgtcgtcgagtttgacgggcccgacgaccccctgcacgcccagaactggccgctcaagaagaagcttgccacggctgccatgctcggcttcaccaccatgacggccgcgttcggctcgagcatcttctcgaccgcgacccgggcggtaggcgtcgagttcggcgtctcgcccgaggtctccctcctcggcgtctccttatacgtcctcggcttcgcgaccggcccgaccttctgggcgcccctgtcggagctcaagggccgccgcctgcccctggtcatctccatgttcggcttctccatcttcaacacggccaacgcggtggccaaggacctccagacggtgctcatcacgcgcttcttcgccggcttcttcggcgcctcccccctggccgtcgtcgccgccgtcttctccgacatgttcgacaaccggacgcgcggcatcgccatcaccgtcttctccatgaccgtcttcaccggcccgctgctggcccccttcatcggcggcttcatcaccgagtcccacctcggctggcgctggacctcctggatcgtctccttcatgggctggctcgccttcgtcctcgacctcgtcttcctgcgcgagacgtacccgcccgtcatcctgatcgacaaggcggccgagctgcgccgccgcactctcaactggggcatccacgccaagcaggaggagatcgaggtcgacctgcgcgagctcatcaccaagaacttctcgcgccccatgcgcctgctcttcaccgagcccatcgtcaccctcctgtccgtctacatggccttcatctacggcctgctctacctcttcctgaccgcctaccccttcgtcttccagggcgtccacggcatgaagcccggcgtggccggcctgaccttcttcggcatgatcctcggccagatcgtcgccggcatcaccatcgtgctgcagcagccctggtaccagcgcaagctggccgccaaccgcggcgtccccgtccccgagtggcgcctgcccagcgtcatcgccggcggcgtcgccttcgccgccggcctcttctggttcggctggtccggctaccgccgcgacatccactggatcgtgcccaccctctcgggcctgctcagcggcttcggcctcgcctccatcttcctccaggccctcaactacctcgtcgacgcctacctcatgttcgccgcctccgccatcgccggcaacaccttcctccgctccctcgccggcgccggcttccccctcttctccacctacatgttcgacggcatgggcatccagtgggcctccaccctgctcggctgcgtcgccgccgctctcgtccccatccccatcatcttctacctttacgggcccaagatccgcgccaagagcgccttcgccccgaccttccccgccaccatgccaccagaggaggcggcggcggcgacacctgctgcccccggcaccccctctgaggaggagcgcgccaacaccccggacgagaaggagatcctggagggctcggccaacgcgaacttgccaaagttggataaggacgcgaggagtgccgtctaa

SEQ ID NO: 5163 - protein, 626 aa, Myceliophthora thermophilia
MTLGDIDRAIEAAELDASGRRSEEIERVVSASSVSSSSSSGASRPGMSRVETQRDLERDPTELSRIQTARSQHSGTVGRAKSKEWKKPLPNFGAGKPYPPLLPNQEDYVVEFDGPDDPLHAQNWPLKKKLATAAMLGFTTMTAAFGSSIFSTATRAVGVEFGVSPEVSLLGVSLYVLGFATGPTFWAPLSELKGRRLPLVISMFGFSIFNTANAVAKDLQTVLITRFFAGFFGASPLAVVAAVFSDMFDNRTRGIAITVFSMTVFTGPLLAPFIGGFITESHLGWRWTSWIVSFMGWLAFVLDLVFLRETYPPVILIDKAAELRRRTLNWGIHAKQEEIEVDLRELITKNFSRPMRLLFTEPIVTLLSVYMAFIYGLLYLFLTAYPFVFQGVHGMKPGVAGLTFFGMILGQIVAGITIVLQQPWYQRKLAANRGVPVPEWRLPSVIAGGVAFAAGLFWFGWSGYRRDIHWIVPTLSGLLSGFGLASIFLQALNYLVDAYLMFAASAIAGNTFLRSLAGAGFPLFSTYMFDGMGIQWASTLLGCVAAALVPIPIIFYLYGPKIRAKSAFAPTFPATMPPEEAAAATPAAPGTPSEEERANTPDEKEILEGSANANLPKLDKDARSAV

SEQ ID NO: 5164 - DNA, 798 bp, Myceliophthora thermophilia
atggatcaccacgacatgactggcatgtcgtccgtggcgacaatgactacgacggctgccgcagctgctgccacgagctctggaaagagtgggatgggcggcatgggcggcatggggagcggaaacggttgcaagatctccatgctgtggaattggaacaccatcgatgcatgcttcattgcgaaatcgtggaagatcacgtccaggggcgtctttgccggatcctgcatcggtgtcgtactgctggttatcgtcctcgagatgctgcgccgttccgtcaaggagtacgaccgcttcctcctcaacaagcaccgcaaatcgctggcggccgccaagccgactccatcaccaaagacggcgtccgatgacggcaccgatgctcttcactgccctgctgttgtcagtcaggggtaccgcccgaacgtgttcgagcaggccatacgcgctctactgcacatgttgcagttcgccgtcgcctactttattatgctgctagccatgtactacaacggctacatcattatctgcatcttcatcggcgcctacattggcagcttcattttccattgggaaacactcggcggtggacagcagaccagcgcttccaaggaagccacccttgctgtcgactcccaaccagtcaacatcggtaccttatcgttagagcgaacgttgcccagcctgtgtctacctttggcgctggcctctgaccctacattcaatgttttgggcgcatgccaagatcaggttgtccctgaggcaaagatcgatcagttcgttcaaaacgattcggaatga

SEQ ID NO: 5165 - protein, 265 aa, Myceliophthora thermophilia
MDHHDMTGMSSVATMTTTAAAAAATSSGKSGMGGMGGMGSGNGCKISMLWNWNTIDACFIAKSWKITSRGVFAGSCIGVVLLVIVLEMLRRSVKEYDRFLLNKHRKSLAAAKPTPSPKTASDDGTDALHCPAVVSQGYRPNVFEQAIRALLHMLQFAVAYFIMLLAMYYNGYIIICIFIGAYIGSFIFHWETLGGGQQTSASKEATLAVDSQPVNIGTLSLERTLPSLCLPLALASDPTFNVLGACQDQVVPEAKIDQFVQNDSE

SEQ ID NO: 5166 - DNA, 2121 bp, Myceliophthora thermophilia
atgctcttgtacacgagacttgctcctcccaagcagcccaaaaggcgatcacgaggcgggtgcactttctgtaaggaaaagaagaaaaagtgcgatgagaagcggcccaaatgcagtcgttgccaggatcagggcgtcgaatgcgtctatgaagccgtgaaaccccgccaacggaggcggcgcgactcggcagcccccagcagccctcatggtctccagcagatgacccggcggttgtcacaggtcagccactccagccacggcacggagtactactctgggcgtgatgatggtgtgctcaggaacctcgtggcctacgccctcgatgacccatttatcccgagtccatccgacagcagcttcgacggttatccttttccttctcccttcacgcctattgaactctcggacagccagcgggacgatgctcactcggaagacggccaacaaaccacgactagcactgcggtggtttctcgatccaaatccttgtgcccggacctggccatgattgcgccctgtccagtcggctctcctttgcttgacttctgcgcgcccacattctcggaattctcagacaggcaaaatcgccgggcactggtagatcacttttgcaacgtcctgtcccatctcattgtcttccgcgaggagacgggcaaccccttccagcaactggtgctgccccttacccggcgagactctccggtcacatacgcaatctttgcgctcgcctgtgcgcatctcgagtaccggggcgtcgaaaacgcagagaaatcactctactttcacaacatggccattcgaggggttgctcagttgatccaggacagcagcaaagtcaacaggaacgagatattagcggccatcatgctgttggtctactatgaatgcctcgttcaaaagggccattccaacattgtagctgggcatctcaagggagctctgaccatcatgggcaccacaccggatccgggggactcgacaagcgtctttttggagcgcgctttccgcttctacgacgtgatcactgccctgtccaacggcaccccgccactctcagcaacgccctcgctgagccgtctccagccactctcccccttaggcgccccccccgtttcgccgttgtgtaacgtcgacactcttctcggcatggcaactaccctatggcccatcatccaccgtctcgccggtcttcgcgccctcaaaacggagctcgagaatgccagccgcatagatggcaactcttccaaggccgccgtcctccggaccgagttcgagtctaccgcccaagcgatcgagatggccctgctgcaatggcaaccccagctcccgccgggtttcacgcctgatccggatcccgaggtcgacttggcagcggcaatggcgacatcatcattgtcaccatcatcaaggttagcaacaacagcgacgacgccgacggcgccggcgccggcggtggcggacccaataccagcagtaccctattcccacctttccccccttccaacagattccgcactccacatcaccaccaccgccggcggcgaccccgattccccattctcctccgacccgtttcccgaaggcctgtcaagcaccaccccgcagtccatcatcacgccgccgccgcagccgagcgcgcaggaccgatcgcggatcgcgtccatctaccacaacgcgctcgcctaccggcacgcggcgctggtgtacctctaccggacggtgctctcgcggccgcggacgcacgcgtcggtgcaggcgcaggcgcggctggcactggcgcactgcgtgtcgacggtgcgccaccgcgggcccatgtcggccctgctctggcccctcttcgtctcggcctgcgaggccgtcgccccgcgcgaccgcgccctcgccgagcgcaccttcgtcgaggtcgaccgccgccagggcatgcgcaacatcgagcgcgcccgcaccatcctggccgaggtctggcgccgcgaggacgaggctgccgctgccgctgccgctgcgggcgagctggacggcgccgatggcgggggagctgggaccgagatggagaacaatggggaggagctgtggaggcgggtatgtagggagatgggcgtcagtgtcgtctttgggtga

SEQ ID NO: 5167 - protein, 706 aa, Myceliophthora thermophilia
MLLYTRLAPPKQPKRRSRGGCTFCKEKKKKCDEKRPKCSRCQDQGVECVYEAVKPRQRRRRDSAAPSSPHGLQQMTRRLSQVSHSSHGTEYYSGRDDGVLRNLVAYALDDPFIPSPSDSSFDGYPFPSPFTPIELSDSQRDDAHSEDGQQTTTSTAVVSRSKSLCPDLAMIAPCPVGSPLLDFCAPTFSEFSDRQNRRALVDHFCNVLSHLIVFREETGNPFQQLVLPLTRRDSPVTYAIFALACAHLEYRGVENAEKSLYFHNMAIRGVAQLIQDSSKVNRNEILAAIMLLVYYECLVQKGHSNIVAGHLKGALTIMGTTPDPGDSTSVFLERAFRFYDVITALSNGTPPLSATPSLSRLQPLSPLGAPPVSPLCNVDTLLGMATTLWPIIHRLAGLRALKTELENASRIDGNSSKAAVLRTEFESTAQAIEMALLQWQPQLPPGFTPDPDPEVDLAAAMATSSLSPSSRLATTATTPTAPAPAVADPIPAVPYSHLSPLPTDSALHITTTAGGDPDSPFSSDPFPEGLSSTTPQSIITPPPQPSAQDRSRIASIYHNALAYRHAALVYLYRTVLSRPRTHASVQAQARLALAHCVSTVRHRGPMSALLWPLFVSACEAVAPRDRALAERTFVEVDRRQGMRNIERARTILAEVWRREDEAAAAAAAAGELDGADGGGAGTEMENNGEELWRRVCREMGVSVVFG

SEQ ID NO: 5168 - DNA, 1608 bp, Myceliophthora thermophilia
atggcgagatttttctccaagacccgcgacggtgagagcggcgagaagtcgccgactcccgtccaagatgttcctcggtccgagttgagcggcgaagaaggcgtcgtcgacgaggcccaagatgacctgcaccgggggatgaagcctcggcagttgaatatgatggccattgcgggcgcgattggaaccggtctcgtcatcggcaccggcacatccctcaaattcggacccgggtcactgcttatcggatacgctttcatgggcttcgttgtctacgtggtcatggtcgcgctcggcgagatgggtgcttggctgccgatgaaaaagagcttctcgggctacgccacacgctttgtcgacccggcgatgggattcgcgacgggctggaactactttttcaaatacgtcattgtgctaccgaacaacctcactgctacggggattctgctgcagaaatggaggccagacatcaacgtgtcggtctggatcgtcgtcttcggcgtcgccatcgtcgccctcaatatgatccacgtctcattctttggcgaagccgaattctggatgtcgctggtcaaggccctcgtcatcttgatgctgatcctgctctgcttcatcattgccctcggcggtggccctaacggcgttcgcaccggtttcgtcttttggcgggacccgggcgcctttgcgcagtacacggcatcagcgggcggcgacacggccgtgatccccggcgccaccggccgcttcctcggcgtctgggcttgcttggtccaggctacctttgcctacctcgggaccgagctcgtcggcgtggcgtttggcgagacgcccaacccccgcaagaacgttccccgcgccgtcaaccagaccctcctccggatcgtcttcttctacgtcgccggcgtcttggttctcggcatggccgttccctacaatagcgagcgactgctggccgccaccaagaagggcaccagcggattggcctctcccttcgtcgtcgccgcgcagatcgccggtgtcaacaagctcgacgacgctgtcaacggtctgctcatgatctttaccatcagcgccgccaactcggacatctacctcgcctcgcgcacggcctgggcccttgccaaggacggccaggcccctcagctgatccagcgcaccaacaagagcggcgtgccgattccggccgttgccctctcctccattttcatcgccctcggcttcatgaacgcgaccaagtcctccgcgacggtttttggttacttcgtgtcattggtgaccgtcttcggcgcgctcaactggatagccgtcctcgtgagctacctggccatgatcaaggccatgaaggcgcagggcgtcccacgcgaggtgatgccgtaccggaaccccctcctgccgtggggcgcgtacatcgcgctggccatcaccgccctcatcatcatattcagcggttattcggcgttcatcccgcacttccaagtcgacaagttccttacctcgtacattggaatccctgtgtatatcatcaatatcttgtggtggaagttcgtcaagaagacgaagagggtccggcccgaggaggtcgatttggtgacagggaggagaagctga

SEQ ID NO: 5169 - protein, 535 aa, Myceliophthora thermophilia
MARFFSKTRDGESGEKSPTPVQDVPRSELSGEEGVVDEAQDDLHRGMKPRQLNMMAIAGAIGTGLVIGTGTSLKFGPGSLLIGYAFMGFVVYVVMVALGEMGAWLPMKKSFSGYATRFVDPAMGFATGWNYFFKYVIVLPNNLTATGILLQKWRPDINVSVWIVVFGVAIVALNMIHVSFFGEAEFWMSLVKALVILMLILLCFIIALGGGPNGVRTGFVFWRDPGAFAQYTASAGGDTAVIPGATGRFLGVWACLVQATFAYLGTELVGVAFGETPNPRKNVPRAVNQTLLRIVFFYVAGVLVLGMAVPYNSERLLAATKKGTSGLASPFVVAAQIAGVNKLDDAVNGLLMIFTISAANSDIYLASRTAWALAKDGQAPQLIQRTNKSGVPIPAVALSSIFIALGFMNATKSSATVFGYFVSLVTVFGALNWIAVLVSYLAMIKAMKAQGVPREVMPYRNPLLPWGAYIALAITALIIIFSGYSAFIPHFQVDKFLTSYIGIPVYIINILWWKFVKKTKRVRPEEVDLVTGRRS

SEQ ID NO: 5170 - DNA, 876 bp, Myceliophthora thermophilia
atggccgtcgcagttcttgtctctcgcaacgatgcgctgagaacacaccctcccgcgggtgacgcgagactctctgtaaatggctccaactggctctttaccgtcacgagcattttcgggctcgctactctcatcttctgggccctcaagttccgcgcccgcagcggagagcgcttcttccactacctcttcatcatcaccagcttgaccggcctgatcgcctactatgccatggcctccgacctggcgtgggtgccgatccggcaggccaactcggtcggccacagcgggctcgtccggcagatcttctgggccaagtacgtcttctgggtggtcgccttcccggccatcgtcatcgccctcggcgtcctgtccggcgtctcctgggccaccatcgtctacaacgtcgccctcacctggacctgggtcatcggctacctcgtggccgccttcacgccgtccaacttcaacgctgcggaccgcgtcggcatccgccgcgactacttcgccctcaccggctgggtcaccttcctctggctgatctacccgctcgcctggggcctgaccgatggcggcaacttcaacggcgtcaccggcagcttcatctggttcggcatcctcgacatcctcctcttcctcggcaccggcttcgccatcatcttccgctccggccgctgggactacggccgcctcaacatcgccttcacccagtacggccgcgtccccgcccaaccgggcaccttccccgagaaggccgccccgccggccgctgctgccggtgccggtgccgctcccgctcccgctcccgctgccgctcccgctgccggcccggccacaaccaccgcccccacggccgccaatactgctactgtttaa

SEQ ID NO: 5171 - protein, 291 aa, Myceliophthora thermophilia
MAVAVLVSRNDALRTHPPAGDARLSVNGSNWLFTVTSIFGLATLIFWALKFRARSGERFFHYLFIITSLTGLIAYYAMASDLAWVPIRQANSVGHSGLVRQIFWAKYVFWVVAFPAIVIALGVLSGVSWATIVYNVALTWTWVIGYLVAAFTPSNFNAADRVGIRRDYFALTGWVTFLWLIYPLAWGLTDGGNFNGVTGSFIWFGILDILLFLGTGFAIIFRSGRWDYGRLNIAFTQYGRVPAQPGTFPEKAAPPAAAAGAGAAPAPAPAAAPAAGPATTTAPTAANTATV

SEQ ID NO: 5172 - DNA, 1539 bp, Myceliophthora thermophilia
atggggtttacaacagtactcgaaccccgtctgcgttcggccatcccagatacgccgcccgaggtgctcacaccggactcggcctctttccccttgcgccagttcgagcgtgctcctccgtccccgcccatgtccaactatgaaccgaccgtcaaggcaaccgacatgtcgtccggaaaggggccagaggagtcttcgacagcccacagggagtcatcggccgatcgaagtggaagcggtgcgccgcgagagcagcttccgtccttgagcagcctctttgggccctcgtcccagacgcccctactccactcgcccttctcagaccggccaggacactactcggcgtcgtcgtcaccactcgactatcccccaaggccgaccgtggggtcgtcctcgtactttcagcctcctggatcttcggcctcgcagacgcggagcctgctggagtccaagttgcccgaccgccctcagatcccgcccctgtcgagcatgtttccgagaccgctttcgcccgtaccgcgtcaagagcaacaacgcctcgagcacggctccggaaaccagtggtcgtcagtacgccacgacgcgaaccgggagtactcgctcggcagccgagatccccaccagtattatcagcctccccccctggaccgatactcatctcacttgcccagcggccggggcgacggccggagagcggatttccgagagcaaccggcgccgcagacgccggcgcctaccaaccccccggcgaccccgacaagcagcgtcggctcggaggtccctccggtgaaggacgggctggggcccaggatctggacagggacgcactttctgccgcggttcgtccgggcggccgaggtccccggtgaaggcatgtgctatttctacgatgatggaagtcactgcaaaacagtcatcgatggcgaggcggtcaacgcccattggggcgtgaccaaggcggggaaaccgaggaaacgactggccatcgcgtgcgtaacgtgccgcgagaagaagatcaagtgcgacccggactatccgcggtgcttgcagtgcgagaagtttggccgggtatgcaagttcaagaatgcgccccgaggaggtcataataacaatgcgccttctacgccccccgccgatcaggaagagatgcgtcggttaggcagcggaacggcttcgcggccgacgacggagagcggcagtaacagcagcaccactaccaccaacaacaaccacaacagcagcagcaatcagcagtaccattatccaagaccggacagccactcgagcggatcggtatcgccgcggacaacaaccgcgcaccggccggcaagtcctgatccggccggctctgggccacggaagttggcccgtgtcggctacaaccactacagcccgactactgggcgggtgtctccgctgactcccacacccgaggcagcgcagcggtctacttcgacaacatactcatggcggcagccagagacattgccgagaattcacgatgatgtcctgcggaggacttggcaggctgaatcgtaa

SEQ ID NO: 5173 - protein, 512 aa, Myceliophthora thermophilia
MGFTTVLEPRLRSAIPDTPPEVLTPDSASFPLRQFERAPPSPPMSNYEPTVKATDMSSGKGPEESSTAHRESSADRSGSGAPREQLPSLSSLFGPSSQTPLLHSPFSDRPGHYSASSSPLDYPPRPTVGSSSYFQPPGSSASQTRSLLESKLPDRPQIPPLSSMFPRPLSPVPRQEQQRLEHGSGNQWSSVRHDANREYSLGSRDPHQYYQPPPLDRYSSHLPSGRGDGRRADFREQPAPQTPAPTNPPATPTSSVGSEVPPVKDGLGPRIWTGTHFLPRFVRAAEVPGEGMCYFYDDGSHCKTVIDGEAVNAHWGVTKAGKPRKRLAIACVTCREKKIKCDPDYPRCLQCEKFGRVCKFKNAPRGGHNNNAPSTPPADQEEMRRLGSGTASRPTTESGSNSSTTTTNNNHNSSSNQQYHYPRPDSHSSGSVSPRTTTAHRPASPDPAGSGPRKLARVGYNHYSPTTGRVSPLTPTPEAAQRSTSTTYSWRQPETLPRIHDDVLRRTWQAES

SEQ ID NO: 5174 - DNA, 1563 bp, Myceliophthora thermophilia
atggacaaggcaaacaaagtcccgaacggggagacccggaaggactacaagctggtcactttcacggagggcgacccggagaaccccaagaactggtccaagctattcaagtggtacatcaccatggtggttgccgtcacatgtttcgtcgtcgccttctgctccagcgtcatcaccgccgacatctccggcgtctcggagtcgttcaatgtcagctacgaggctgcccttgttaccatcaccgtgtttgtcgtcggtttcggcgttgggcctatgatttttgcccctctttccgaggtctacgggagacgcatcatctatggctctaccctcttggtcgccgtcgtcttcatcatcccctgcgcagtcgccaagaacatcggcaccctaattgtctgcagagcgatcgacggcatcgctttctccgcacccatgactctcgtcggcggtacccttgccgatctctggcgtaacgaggagcgtggcgttcccatggctgccttctctgctgctcctttcatcggccctgcgattggccccctcattggcggtttcctgtccgacgcggctggctggcgctggctgtactggattcagctcatcttcgccttcgtcgtctggttcctcatcaccttcaccgttcccgagacctacgcacccacgatccttgcgcgacgcgcggcgaagctgaggaagcaaactggcgaccagggccacgttaccgaggccgaactcgacccccgcccgttctcccagcggctcggcgtcttcctcatccgccccttccagctgctcttccgcgagctcatcgtcttcctcatcagcctgtacatgtccgtgctctacggtctcctctacatgttcttcgtcgcctaccccatcatcttcgaggcccgcaagggctacagcgcgggcaccaccggtctcatgttcattcccgtcgccgtcggcgtcatcctctcggccgcctgcgccccgatgatcaacaagcactacctcaagctcgtcgtcaagcacaacggccggccccccgccgaggtccgcctcatccccatgatggtcagctgctggttcatcccgatcggcctcttcatcttcgcctggacgtcctacccgcacctgatctgggtcggcccctgcctcgcgggcctgcccgtcgggttcggcttcatcttcctgtacaacgcggccaacaactacctggtcgactcgtaccagcaccaggccgcctccgccctggccgccaagacgttcctccgttccttctggggcgccggcgtcgtcctcttcaccgagcagatgtacgaccgcatgggcgaccagtgggcgtccagcttcctggccttcctgagtctcgcctgttgcgccatccccttcttgttctggcgctacggcgccaggatccgcgcgcggagcaagtacgccttcggtggcgaggaggagaagaaggaggaggaggagctcgagaagggccgggaggcgcggcccgtcgacgcgaacgcgccgctgcacgaggacctggaggatctggagcgggcgcgcagttacgtggccaacccatga

SEQ ID NO: 5175 - protein, 520 aa, Myceliophthora thermophilia
MDKANKVPNGETRKDYKLVTFTEGDPENPKNWSKLFKWYITMVVAVTCFVVAFCSSVITADISGVSESFNVSYEAALVTITVFVVGFGVGPMIFAPLSEVYGRRIIYGSTLLVAVVFIIPCAVAKNIGTLIVCRAIDGIAFSAPMTLVGGTLADLWRNEERGVPMAAFSAAPFIGPAIGPLIGGFLSDAAGWRWLYWIQLIFAFVVWFLITFTVPETYAPTILARRAAKLRKQTGDQGHVTEAELDPRPFSQRLGVFLIRPFQLLFRELIVFLISLYMSVLYGLLYMFFVAYPIIFEARKGYSAGTTGLMFIPVAVGVILSAACAPMINKHYLKLVVKHNGRPPAEVRLIPMMVSCWFIPIGLFIFAWTSYPHLIWVGPCLAGLPVGFGFIFLYNAANNYLVDSYQHQAASALAAKTFLRSFWGAGVVLFTEQMYDRMGDQWASSFLAFLSLACCAIPFLFWRYGARIRARSKYAFGGEEEKKEEEELEKGREARPVDANAPLHEDLEDLERARSYVANP

SEQ ID NO: 5176 - DNA, 1569 bp, Myceliophthora thermophilia
atgggtatctttgccttcaacaagcagaagcccaacgctgaagcgaccgcggtcgctcaggaggaggccccccagttcgagagggtcgattggaagagagatcccggcctcaggaagctttatttttacgccttcgtcctgtgtatcgcgtcggcaaccactggttacgatggcatgttcttcaattccgtccagaactttgagacatgggagaactacttcaaccacccgacgggctccaagctcggtgttctcggcgctctctaccaaatcggtagcttggcttccattcctctcgtacccatcattgccgaccgcgtcggtcgtaagatccccatcgccatcggatgcgttatcatgatcgtcggtgccgttcttcaggctgcttgccgcaacctgggcactttcatgggcggccgtttcctgcttggtttcggcaactcgctcgcgcagctctgctctcccatgcttctcaccgagctggctcaccctcagcaccgtgggcgtctcaccaccgtctacaactgcctgtggaacgtcggtgccctggtcgtcgcctgggtctccttcggcaccgattacctcaagagcgactggtcctggcgtattcccgccctcatccaggccttcccctcggtgatccagctcctcttcatcttctgggtgccggaatcgcctcgttacctgatggccaaggataagcacgagcgggccctggccattctcgccaagtaccacgccaacggcgacgccaaccatcccaccgtccagttcgagtaccgcgagatcaaggagaccctccgcctcgagttcgaggcctccaagtcgagcagctacctggacttcgtgcgcaccaggggcaaccgctaccgtctggccgtcctcatctctctcggtatcttctcccagtggtctggtaacgcgattatctccaactactcgagcaagctgtacgacacggccggcgtcacgggctcgacccagaagctgggtctctctgctggccagaccggcctctccctcatcatctcggtcaccatggccctgcttgtcgacaagttcggccgtcgccccatgttcctgacctccacggccggcatgttctgcaccttcatcttctggaccctcacgtccggcctctacgaagagcacaacgcggatggcgcccgctacgccatgatcctcttcatctggattcacggcatcttctactcgatctcctggtccggtctgctcgtcggctacgccattgaggttctgccgtacaagctgcgtgccaagggtctcatgatcatgaacctgaccgtccaggccgccctcaccctcaacacctacgccaacccggttgcctttgacgcattcgagggccacagctggaagttgtacattatctacacgatctggatcttcctcgagctgtgcttcgtttggaagatgtacatcgagaccaagggtcccaccctcgaggagcttgccaagatcatcgatggcgacgaggccgccgtggctcacgtcgatatcaagcaggtcgagaaggagacgcacatcaacgaggagaagtccgtttag

SEQ ID NO: 5177 - protein, 522 aa, Myceliophthora thermophilia
MGIFAFNKQKPNAEATAVAQEEAPQFERVDWKRDPGLRKLYFYAFVLCIASATTGYDGMFFNSVQNFETWENYFNHPTGSKLGVLGALYQIGSLASIPLVPIIADRVGRKIPIAIGCVIMIVGAVLQAACRNLGTFMGGRFLLGFGNSLAQLCSPMLLTELAHPQHRGRLTTVYNCLWNVGALVVAWVSFGTDYLKSDWSWRIPALIQAFPSVIQLLFIFWVPESPRYLMAKDKHERALAILAKYHANGDANHPTVQFEYREIKETLRLEFEASKSSSYLDFVRTRGNRYRLAVLISLGIFSQWSGNAIISNYSSKLYDTAGVTGSTQKLGLSAGQTGLSLIISVTMALLVDKFGRRPMFLTSTAGMFCTFIFWTLTSGLYEEHNADGARYAMILFIWIHGIFYSISWSGLLVGYAIEVLPYKLRAKGLMIMNLTVQAALTLNTYANPVAFDAFEGHSWKLYIIYTIWIFLELCFVWKMYIETKGPTLEELAKIIDGDEAAVAHVDIKQVEKETHINEEKSV

SEQ ID NO: 5178 - DNA, 1641 bp, Myceliophthora thermophilia
atgcccaaagccagatccagagtgcccgtcaaggtgaacgtggggacgtccgccgaccccatcgtcacccgcctcgtgcaggaggacaagatcccatggtacaagaagccgaacctgcggcgcatgtacatcttcctcttcctgtgctgcatgggcgttgagatgacctcgggtttcgactcgcagcttatcaacacgctccagtacgcagagaccttccacaagtacctgggtaacggccgcaaggatgaggacggaaactacgccatcgagcccggtcttctcggcttcgtcaactcgtgctaccagctcggatccatcttcgccgtcccgatcgcgccctggttcgcccagcgctttggtcggcggtggtccatcatgctcggatccctgatcatggtcggcggtgccatcatccagggcttcgcgcaacatgttgccatgtacatcatcgcccgcatgatcctcggcatgggcatcttgttctgcatcatctcgggcgccgccctgatcggcgagctcggccaccccaaggagcgtgccgtgctgacctcgctcttcaactcgtcctacttcatcggccagattctcgcgtccgccatcacgatcggaacgaccgagatgaagacgaactgggcctggcgcctcccgtccctgctccagatctgcccctcgctgctgcagatcgtcaccgtcttcttcctgcccgagtcgccgcgtttcctcatctccaaggaccgggacgacgacgccaaggaggtgctcatcaagtaccacgccgagggcgacgccagctcgctcctcgtccaggccgagatcgtgcagatccgcgagaccatccggacggagatggaggtgtcgaaccagagctggatggagctcgtgagcacgtacggcatgcgccgccgcctcgtcatcaccctcttcatcggtctcttcacccagctctcgggcaacaccctgctctcgtactactcgggcaagctgttcgagatgatgggctacaccgaggcctcggtcaagacgcgcatcaacgtggccaacgcgtgctggagtctgctcaacgccaccaccatcgccttcctggtcccctacttcaagcgccgccacatgttcatgacctcggccctgtccatgtgcgccgtcttcatcgccatcaccgtctcgctcgagcgcacccaggcggcccaggacgccggcctcaagaacacggccgccggcatctcgggcctcttctggtacttcgccttcgccccctgctacaacatgggcaacaacgccctcacctacacctacctggtcgagctgtggccctactcgcaccgcagccgtggcatcggcgtccagcagatctttggcaagctcggcggcttcttctccacaaacgtcaactccatcgccctcgacgccatccgctggaagtacatggccatctactgcggctggatcttctttgagttcctcatcgtcttcttcctctaccccgagaccagcggccgcaccctggaggagctggctttcctgttcgaggatgccagcctcaacgagaaggccgccgccgccgtcgagaagcagatccattacggggacgagaaggtcgtgcacgaggagggacagccggctgccaagagcgtcgtctaa

SEQ ID NO: 5179 - protein, 546 aa, Myceliophthora thermophilia
MPKARSRVPVKVNVGTSADPIVTRLVQEDKIPWYKKPNLRRMYIFLFLCCMGVEMTSGFDSQLINTLQYAETFHKYLGNGRKDEDGNYAIEPGLLGFVNSCYQLGSIFAVPIAPWFAQRFGRRWSIMLGSLIMVGGAIIQGFAQHVAMYIIARMILGMGILFCIISGAALIGELGHPKERAVLTSLFNSSYFIGQILASAITIGTTEMKTNWAWRLPSLLQICPSLLQIVTVFFLPESPRFLISKDRDDDAKEVLIKYHAEGDASSLLVQAEIVQIRETIRTEMEVSNQSWMELVSTYGMRRRLVITLFIGLFTQLSGNTLLSYYSGKLFEMMGYTEASVKTRINVANACWSLLNATTIAFLVPYFKRRHMFMTSALSMCAVFIAITVSLERTQAAQDAGLKNTAAGISGLFWYFAFAPCYNMGNNALTYTYLVELWPYSHRSRGIGVQQIFGKLGGFFSTNVNSIALDAIRWKYMAIYCGWIFFEFLIVFFLYPETSGRTLEELAFLFEDASLNEKAAAAVEKQIHYGDEKVVHEEGQPAAKSVV

SEQ ID NO: 5180 - DNA, 645 bp, Myceliophthora thermophilia
atgctcgtgcggcgcatcctcaagtcgcacccccacctcctccacaacccggaccactcgccggcgggcaacgccaactcgaacctgcacctggccgcgtcgctcggccacctagccatctgcgagctcctggtcgagctcggccacgaggccgaagggcccgccctcaacgacgaccaccagacggcgctgatgctggcggccgcgggcaagcacacggacgtggtcttcttcctctgcaagcacgacccgggctcgatcctgcgccaggacgtgcggggccgcgacgccatcatggaggccagcctgtccggggacgacacggccctgcagatcctgctgacctacgcccccgggggcgccgccgccgcgctcgcccgggccgacgtcgacggcaacacggccctgcactacgccagcagcaccggcaacgtcaccatcctgcgcaccctcctcgccgccggcgccgacccggcccgcaagaacgcctgggactggacggccgaggcctacagcgccaccgtccagaccgaggtctacttccgcagcctggtcgacgagaaggacaaccggaaggagggtgtcaagcgcgagggcaaagtggtcaagccggcggcgacatggtggggcggcggctggaattga

SEQ ID NO: 5181 - protein, 214 aa, Myceliophthora thermophilia
MLVRRILKSHPHLLHNPDHSPAGNANSNLHLAASLGHLAICELLVELGHEAEGPALNDDHQTALMLAAAGKHTDVVFFLCKHDPGSILRQDVRGRDAIMEASLSGDDTALQILLTYAPGGAAAALARADVDGNTALHYASSTGNVTILRTLLAAGADPARKNAWDWTAEAYSATVQTEVYFRSLVDEKDNRKEGVKREGKVVKPAATWWGGGWN

SEQ ID NO: 5182 - DNA, 5763 bp, Myceliophthora thermophilia
atggctggatactcgcagaacccgaactacaagccgcttccgccaccgggaaattacccccacggctatcactcccaaggtcagcagcacctacagcagcagcagcagcagcagcaacaacaactcggcgccaatgccctccaccggccgccttccttcgtagggctaccccccatccgccgcgcttccaccttcggctcctcccttggcttgaacgccgaggagttttcgtcctccgacaacagcgctgacggtgctgcccgtcagcagcaaccccagcagcacccccagcagcagcagcagcagcagcagccccagcaagccagtgctccccctcaagggacttcacctccgccaaccatgaccggaacgcagcagacgacgggccagttcatgcatccctcgcaaccctccgatcagtccgtccagaacatctaccgcccaacccagggggcgcagggtcctcaggggacccaaggaccgccgcgccagggtcaaacatggcagctgcagggacagagccccggccagaaccagggcttccccaaccccgcgttccagcatgctgcctttcacggccagggaccggctcagacaccgccaagagcatttgggggaccacccggaggccctcaaccgatgccgaacggatccgccttccctccgggtcaaggccaacagtttggccaaggcggcggtcggccaataatggtcccgccccatatgttgcccgggaacttcgctcaaagattccacctccaaggcggaggctggaacctgcaagaatcgcatctgtctgagccgctccatcccacgggccgccatcgtcgctccccgagcaacacgtcttcacagcaacagcagcagcctttctacggctatgacaaggaaactggaatctacacgccgacgtcgccggcccggcggcacaagcctccgcaggagcagcagaatcaacagtcccaacaatctcagccaacccagccaacccagccaacacagcaagatcagcaaaaccagcaggaaaaggccacacagccttcgggcttgcccacccaggggggtcagccggccacccctcagcagggtcaggcagtgccgacgatccaacagagcccggtgaatcagcagctcggcggcaacggcttgtcgcatttgcagtcccaccagtctcagcagagtgagttcgggcgccatggtggttcccctcacgagaacggcggagccgacaggcgtaactcgggcgtcttctccagccttcggaatcggcttgccggcggtcattcggaggagccccgtggcggcggcggcgacgcgccaaaaccacagacggccaatggcgactctgcctcggtggcgagcatcacgacggagcctgcgggacagcaacgggagcagaacccggtctttggaccaaaggccggctcgcccacccccgacaatttttcgttcagccagagcaaagacagcatcatcgcccgcggctccgggacccccgtcggcgagcgcgatcaattggagcctcacccttcgcagtttgcgccgcctagcaggaaaccgacaggcttcctcaactttggttctcacacgacgccagtccagccgggcggcagtattgcctctgctgcccctagggcggggtcgccggcacactcatcgggccacaagcatacgggaagcaccggaggtcccaaaaagcgcttttccgcactaaaggacgtgttccgatcgtcgcctcgtgacggttccagcaaaacgggaactttcaccgtcaggatacccgcgcaaaccggttcccagatgcagactcggacgccgccacctcaaggacagtaccagggcatgacgaacggccagacttcgctccagttgcagggtaaacctccgcagaccggccccggacctcagccgggttccatcaaccccccgccggctagctttgggcctcctcctccaccaggatcgagcaacggctcgcccgccggtcctgcacccgctacccagccaggttccctagagcagcagcagcagcagcagcagcagcagcagaaacagcagcaatttgcaggcggccaggagcgcttccctcctgttactggtcccactcaacctggccatggcttcctgccggtgcgacatccgccacaaggacccgctcccgttcagaaccagcaagagaaaaagttaggcgcaggtattcttggtttcctgagaggccgggcggacagcaagtctcaggaacagccagcacagcaaggcaataatttacccgtcaagggccagttccctccgggccagttccctccagggcagtttcctcaggggcaattccctcaggggcaattccctccaggacaagcgcctttcgccgggcagcagttcggcatccgcccccccgtgggccctaatggacccccgccgacgggaaccggacaacaacagttccagcctgggcagttcccgccacaaccgcagttcatgagacccggtcccccggggactgccggttcgttccagtcacaaggtccagcgggggcacagcggcccgggatgcagatgtcacagcagcccggttctgctcatggccaacagcccggtgtgcagggaactgatccgaggccgttggtgcagacgcagccgactcagtcgtcggcccagggccagcccggcaatgtcgggtcgggttcgagctaccagcagagtcacttcagcgcagctcaacaagcccgaccccagcagactccacagcagcagacagccgttccagtccagcgaacgccttccgcatccatcgtcgattctccggtgtcgcaccattcgcagccggcggctcagcccgccatggagagttctcggttccaaacggcgtccccgggaaccacggggcaactgttcgcaccgccttcagcgggctcgaatcagccctcccaccaagccgtcagtgcccaaaacctcggcgcggctcccgaacaaccgccagcgggctctggtcccgaaggctcttcacgcctcgatgttgactccggggaggacgatatgcagaggcccgtgtctcctgcatcgcaggccccagctcctcctccctcgggcatcccaggagaggagatcgagcgcggcgtatcgagacagcctacgacgagtggccagttccagaatgttgacacaagatcgccgtcgcgtgagtcgcgatcggctgcttcccctgggcaagagactccagcgtctgctcaggttccgggttcaatatccggggattcgtcccaaaactctggaccggcacagcagccgcccaaccagcagtttgatactcaaccgggcctgcggcagcccgttggccagcagggagggcagatgccccccggcccgcctgtccaagggtatcctggtggccaagcaccgtggatggcgaatcaacccggcgctgttccacctcctcagttccgtcagcaattcggacctggcggccccggcccgaacggtgtcccagggaagggccagcaaaaggagaaggaacagagtaccatttccaagttgttgttcggaggcaagtcgtcgagcgcggcagcacccgccccaaagccggagaaagacaagagctccaaaccgtcgattatcggcgcattcaagcgtggaactaagcagcagcccaatgctcaagctccggcccagatgcccgctggtcgacccgtccagggcccgcctactcaaggaacgctgccgtttgcgccaggaatgcagtctcagcctcatccgcagcagcagcagcaagcagggctgcgtcctggcatgatgccacctatgccgcagcctcggccgggcggtccagccgccgcgcaagctcctcttccccagggagagccgcagcccaaggcgggcgtgcaggtttaccaacaaccccttcctcaacagataccccctcgccaggcccagcctctggctccggagcctcaatatgaccaggttcccatcccggctggttatggatatgtccacggcgaaggacgcgtcgccccggccccggcacacatctacgtcgggcctaacccccctccaggtcaggtcctcccgcccgggttccagccgcagtgggtgcagcgtgggatctcgcctgcccaagttctgcccgtgggcgtcctcccccagccggcagtgctccggcagaccaccaccaccattggagctccggtcaccacggtgtcaacgacggcctctactccccagtcccagacgcctgcgccggctcaggcgcagaatggagctccctccgctccccccgctccccccgctgcggagtccgccttgcagcagcccgcaggagttgctcccgtccagcaaccgaccggcgaagtgccgccgcaagtgcaggtccaacaagcacaagtccaacaatcacaagttccccacgttcctcaaacccagtttgctcaaccacagctccagaccgagcagcagcctctcgcccccccggccccaactccctctcctgctcgtggccaggacatttcgccacaatcctcgatccggactccgtcttcacaggttcccgaagcgagtacctcgccgtccgaggaacaggcgcagctccggccagagccgctccgaacgaaaatgtcgccgccaccccagctcgatcaatataagactccacaatccttcgcccctcccaacgctcccgcgacgcaaggggtgagccagccgcatcacacgaggaatgtcagcgaggacgggattgcttcacttccctcgcagcgtcccggacgcgtgcagcccttgagctcagacactgcccctggccctgcccatcttgcatatgtgcctcgcgcaagcaacgacaccgctcctggctcgcagccaacgccaggttggaacaatgcttctcaaccttcagtccaagtgaacgcaaacgccgctgtggagccgaaaccctccagccccgatccgtctgctgctcagggatcttcttctcctgtcaaccagttaacgaccccgacgcaacgcgttgctgaggacaacctctacgacgcgacgccgcgccagacgcagttccctgcgggccgtcgggattctcaacaacggtcgccgccctcacagtcgcggtcgccgccaccgccgcagtcaccgctgcgacaacaacaaccgcagcagcaggagcagcaggagcaacagcaacagcaacagcaaccactgccaagcaacgtgcccagcaacactattgtcatcacggcgcccgtcgaaccgaaatccgccggcctctcgcatgaagtcgcccggcctggcggacccttcgtcggcacctctccgtcccccccaaccgccacaccgactcccccagtcatcactcttgatcctcccaagagcgacggtcgggctcacgatggccacgagtcgaacgaggacgtcgagttcgactcggatatggacgagtcccccatcatccaggacgcctccatcgcgaccctgaagcaggctagcccgtcgaccagcccgacggcgacctcgaaaggcggggacgcgcccgcgccgaacggcgtcgcggccgccaaggacagcgtcgccatctttgagcgcgccaagaagaaggcggaggagcagcgcgagatggagcggcggatgctgctcgaggagaagatccccgtcttccccgccgagcccgacgacgggcccggcaagaagggcgacgacgcgcccatcatgagcgccacgagttacccaggccaggagtggaacccttacggcgagggggggttcgaggactgggattaa

SEQ ID NO: 5183 - protein, 1920 aa, Myceliophthora thermophilia
MAGYSQNPNYKPLPPPGNYPHGYHSQGQQHLQQQQQQQQQQLGANALHRPPSFVGLPPIRRASTFGSSLGLNAEEFSSSDNSADGAARQQQPQQHPQQQQQQQQPQQASAPPQGTSPPPTMTGTQQTTGQFMHPSQPSDQSVQNIYRPTQGAQGPQGTQGPPRQGQTWQLQGQSPGQNQGFPNPAFQHAAFHGQGPAQTPPRAFGGPPGGPQPMPNGSAFPPGQGQQFGQGGGRPIMVPPHMLPGNFAQRFHLQGGGWNLQESHLSEPLHPTGRHRRSPSNTSSQQQQQPFYGYDKETGIYTPTSPARRHKPPQEQQNQQSQQSQPTQPTQPTQQDQQNQQEKATQPSGLPTQGGQPATPQQGQAVPTIQQSPVNQQLGGNGLSHLQSHQSQQSEFGRHGGSPHENGGADRRNSGVFSSLRNRLAGGHSEEPRGGGGDAPKPQTANGDSASVASITTEPAGQQREQNPVFGPKAGSPTPDNFSFSQSKDSIIARGSGTPVGERDQLEPHPSQFAPPSRKPTGFLNFGSHTTPVQPGGSIASAAPRAGSPAHSSGHKHTGSTGGPKKRFSALKDVFRSSPRDGSSKTGTFTVRIPAQTGSQMQTRTPPPQGQYQGMTNGQTSLQLQGKPPQTGPGPQPGSINPPPASFGPPPPPGSSNGSPAGPAPATQPGSLEQQQQQQQQQQKQQQFAGGQERFPPVTGPTQPGHGFLPVRHPPQGPAPVQNQQEKKLGAGILGFLRGRADSKSQEQPAQQGNNLPVKGQFPPGQFPPGQFPQGQFPQGQFPPGQAPFAGQQFGIRPPVGPNGPPPTGTGQQQFQPGQFPPQPQFMRPGPPGTAGSFQSQGPAGAQRPGMQMSQQPGSAHGQQPGVQGTDPRPLVQTQPTQSSAQGQPGNVGSGSSYQQSHFSAAQQARPQQTPQQQTAVPVQRTPSASIVDSPVSHHSQPAAQPAMESSRFQTASPGTTGQLFAPPSAGSNQPSHQAVSAQNLGAAPEQPPAGSGPEGSSRLDVDSGEDDMQRPVSPASQAPAPPPSGIPGEEIERGVSRQPTTSGQFQNVDTRSPSRESRSAASPGQETPASAQVPGSISGDSSQNSGPAQQPPNQQFDTQPGLRQPVGQQGGQMPPGPPVQGYPGGQAPWMANQPGAVPPPQFRQQFGPGGPGPNGVPGKGQQKEKEQSTISKLLFGGKSSSAAAPAPKPEKDKSSKPSIIGAFKRGTKQQPNAQAPAQMPAGRPVQGPPTQGTLPFAPGMQSQPHPQQQQQAGLRPGMMPPMPQPRPGGPAAAQAPLPQGEPQPKAGVQVYQQPLPQQIPPRQAQPLAPEPQYDQVPIPAGYGYVHGEGRVAPAPAHIYVGPNPPPGQVLPPGFQPQWVQRGISPAQVLPVGVLPQPAVLRQTTTTIGAPVTTVSTTASTPQSQTPAPAQAQNGAPSAPPAPPAAESALQQPAGVAPVQQPTGEVPPQVQVQQAQVQQSQVPHVPQTQFAQPQLQTEQQPLAPPAPTPSPARGQDISPQSSIRTPSSQVPEASTSPSEEQAQLRPEPLRTKMSPPPQLDQYKTPQSFAPPNAPATQGVSQPHHTRNVSEDGIASLPSQRPGRVQPLSSDTAPGPAHLAYVPRASNDTAPGSQPTPGWNNASQPSVQVNANAAVEPKPSSPDPSAAQGSSSPVNQLTTPTQRVAEDNLYDATPRQTQFPAGRRDSQQRSPPSQSRSPPPPQSPLRQQQPQQQEQQEQQQQQQQPLPSNVPSNTIVITAPVEPKSAGLSHEVARPGGPFVGTSPSPPTATPTPPVITLDPPKSDGRAHDGHESNEDVEFDSDMDESPIIQDASIATLKQASPSTSPTATSKGGDAPAPNGVAAAKDSVAIFERAKKKAEEQREMERRMLLEEKIPVFPAEPDDGPGKKGDDAPIMSATSYPGQEWNPYGEGGFEDWD

SEQ ID NO: 5184 - DNA, 3108 bp, Myceliophthora thermophilia
atgtcgtcgccagccaagagatcgacgcgcagctctgcaacgccgagccgggccactcgcagctcgcagcagcagcagcagcagcagcagcagcagcaacagagcagccccgcggctggcccctcgaaccgcccgaccgcagcagagaggacaccccgccagacgaggtcatcgcagctcgcctctagcccgctgttctaccagtcttcgtctcctgcccccggcgccgataggccctcttcccctctccgccagatgagcaatagccagagcacggccaaccacgcacccagctcgcccttgcgccagcagacagagacccagagcgccggagaccggactccccgcccgagcgctcgcctcatcggagactcctccccgatccgctatgaccccagttccagtcctggccgccagctcacccagcagtccgacctccgcagcgacagcagcgcgctgtttgtgagctctcggcgatcagacgtcgccaggccctaccgaggagatatcaactccgatgtcatccgcaccccccgggtgccccgccgcatcatcttggacgacaccggccgcgtggtccgggacggttccgcgctcgggtcagatgccgcttccttcgcaaacaataacccccatacctcggaggccgatgctctcggtggcccgagccagagccttgtctggggtaccaccgtctcgctcgaggattccttcgcctccttcagggacttcctccgcaacttcaccaagaagtaccgcatgtgggcagacggcgccaccgaggccgacaccagcgggaaccccgaggctgactcgaagccgtactgggaggccttggagaacatgctgctgctcggcaccaacaagctgtacctggacctccgcgaccttaaggcctatccccggacggtgaagctgtggcaccaggcccaggcgtacccgaccgagatcatccccgtcatggaccagtgcgtccacgactgcatgatcgagcttgcccaggccgagatggcgagccagagggccgcttcgcacagcgccgccgccgccgccgcggccaacgcgccccaggcctcccagagctccgagattgcattccccagctccgaccgcggagaggactcgtccacgccccggccctctcagcgggaccagatgacgctcgaggaccaggtgatgaagcagcagtacctggtgcgcccttggggcctggagaagaccatcaacctgcgggacctcaacccgtccgacatggacaagctcatctccatcaagggcctcgtcatccggacgacccccgtcatcccggatatgaaggcggccttcttcaagtgcagcgtctgcggccattcggttaccgtcgagctggatcgcggcaagatccgcgagcccaccgaatgcccccgcgcccggtgcaagcagaagaactcgatgcagatcatccacaaccgctgcctgttcgaggacaagcaggtcatcaagctgcaggagacgccagacaccgtccccgccgggcagacgccgcactcggtctccgtgtgcgtctacaacgagctcgtcgacttctgcaaggcaggcgaccgtgtcgagctcacgggcatctacaaggtcacccccgtgcgcgtcaacccgcggatgcggacggtcaagagcgtgcacaagacctacgtcgacgtggtgcacgtgcaaaaggtcgaccggaagaggatgggcgccgacccgtcgaccctcgacctggccgaggaggaggaggcccacacgaacgggcaaagcctcgacgaggtcaagaaggtcactcccgaggaggaggagaagatcaaggcgaccgcggcccgcccggacatctacgacctgctctcccgctccctcgcgccctcgatctacgaggccgacgacgtcaagaagggcatcctcctgcagctgttcggcgggaccaacaagacgttcgagaagggggggagccccaagtaccgcggcgacatcaacatactgctctgcggtgacccgtccaccgccaagtcgcagatcctctcgtacgtccaccggatcgccccgcgcggcgtctacaccagcggcaagggctcctctgccgtcggtctcaccgcctacgtgacccgcgacccggagacgcgccagctggtgctcgagtcgggcgcgctcgtcctgtcggacggcggcgtctgctgcatcgacgagttcgacaagatgaacgagtcgacgcgctcggtcctgcacgaggtcatggagcagcagaccgtgtcggtcgccaaggccggcatcatcaccacgcttaacgcccgcaccagcatcctcgcgtccgccaacccgatcggcagccggtacaacccggacctctcggttccgcaaaacatcgacctgccccccaccctcctctcccgtttcgacctggtctacctcatcctcgaccgcgtcgacgagaagacggaccagcggctggcgcgccacctgctgtccatgtacctcgaggacaagcccgagacggcccagagcagcaacgacattctgcccatcgagttcctgacgtcgtacatctcgtacgcgcgggccaacatccacccgaccatcagcccggaggccgggcgcgagctagtggaggcgtacgtcgagatgcgcaagctggggcaggacgtgcgggcggccgagaagcgcatcacggcgacgacgcggcagctcgagtccatgatccggctgtccgaggcgcacgccaagatgcgcctctcgcagacggtcacgcccgacgacgtccgcgaggccgtgcggctcatcaagtcggccctcaagacggccgccaccgacgcccagggccgcatcgacatgagcctgctgaccgagggcaccagcgccgccgaccgccgccgcaaggccgacatgaaggacgccgtcgtccgcctgctggacgacctgacggccggcggccaggccgtccgctactccgaggtcgccaggaagctggccgacagcgccggcgtccccgtcgagccggccgactttgccgaggtcatgcgggcgctcgagatggaaggcgccgtcatgatcaccggcgagggacccaggaagagtgtgaggagggttacggcgagcatctga

SEQ ID NO: 5185 - protein, 1035 aa, Myceliophthora thermophilia
MSSPAKRSTRSSATPSRATRSSQQQQQQQQQQQQSSPAAGPSNRPTAAERTPRQTRSSQLASSPLFYQSSSPAPGADRPSSPLRQMSNSQSTANHAPSSPLRQQTETQSAGDRTPRPSARLIGDSSPIRYDPSSSPGRQLTQQSDLRSDSSALFVSSRRSDVARPYRGDINSDVIRTPRVPRRIILDDTGRVVRDGSALGSDAASFANNNPHTSEADALGGPSQSLVWGTTVSLEDSFASFRDFLRNFTKKYRMWADGATEADTSGNPEADSKPYWEALENMLLLGTNKLYLDLRDLKAYPRTVKLWHQAQAYPTEIIPVMDQCVHDCMIELAQAEMASQRAASHSAAAAAAANAPQASQSSEIAFPSSDRGEDSSTPRPSQRDQMTLEDQVMKQQYLVRPWGLEKTINLRDLNPSDMDKLISIKGLVIRTTPVIPDMKAAFFKCSVCGHSVTVELDRGKIREPTECPRARCKQKNSMQIIHNRCLFEDKQVIKLQETPDTVPAGQTPHSVSVCVYNELVDFCKAGDRVELTGIYKVTPVRVNPRMRTVKSVHKTYVDVVHVQKVDRKRMGADPSTLDLAEEEEAHTNGQSLDEVKKVTPEEEEKIKATAARPDIYDLLSRSLAPSIYEADDVKKGILLQLFGGTNKTFEKGGSPKYRGDINILLCGDPSTAKSQILSYVHRIAPRGVYTSGKGSSAVGLTAYVTRDPETRQLVLESGALVLSDGGVCCIDEFDKMNESTRSVLHEVMEQQTVSVAKAGIITTLNARTSILASANPIGSRYNPDLSVPQNIDLPPTLLSRFDLVYLILDRVDEKTDQRLARHLLSMYLEDKPETAQSSNDILPIEFLTSYISYARANIHPTISPEAGRELVEAYVEMRKLGQDVRAAEKRITATTRQLESMIRLSEAHAKMRLSQTVTPDDVREAVRLIKSALKTAATDAQGRIDMSLLTEGTSAADRRRKADMKDAVVRLLDDLTAGGQAVRYSEVARKLADSAGVPVEPADFAEVMRALEMEGAVMITGEGPRKSVRRVTASI

SEQ ID NO: 5186 - DNA, 2046 bp, Myceliophthora thermophilia
atgggttacaccgacgtcgacaagctcaccatcaacacgattcgtgtgctggccgccgatgcgacctttcacgccaactcgggccacccgggtgccccaatgggcatggcacctgtcgcacacgttcttttcaacagattcataaggtttaaccccaagaaccctaagtggctcaaccgggatcgcttcgtcctctccaacgggcatggctgcatgctccaatatgcgctcctccacctctacggttatgacctcactattgacgacctgaaggccttccggaaagtcgacagcatcactcccggccatcccgaggctcacgacactcccggcgtggaggtcaccaccggcccgctcggccagggtatcagcaatgctgtcggtctcgccattgcccaggcgcacaccgccgccgtcttcaacaagccgggcttcgacattgttgacaactacacatactgcttccttggcgacggctgcttgatggagggcgtctccgctgaggcttgctctctggccggccacctccagctcggcaacctgattgccatctgggacgacaacaagatcaccatcgacggtgacaccaaccaggctttcaccgaggacgtcctgaagcgctacgagtcgtacggctggcacattctgtccgtcggagacggagacaacgacctcgagggcatcgaggccgccatcaggaaggcccaggaggtcaaggacaagccgaccctcatccagctcaagaccatcatcggttacggctcgaagcagcagggcacccacggcgtccacggctctcctctcaaggctgacgatatcaagcagctgaaggagaagtttggcttcaaccccgaggagagcttcgtcgtgccccaggaggtgtacgaccactgccgcaaggtggccgctgccggtgccgccaaggaggaggagtggaacaagctgctcgccaagtacgccgagcagtacaaggctgagtacgaagacctgacccgccgcctcaagggcgacctccccgagggctgggagaagaacctccctacctacacgcctgccgatgcggctgttgcgtcgaggaagctctccgagactgttctcaacaagatcttcgatgccgtgcccgagcttgtcggcggttccgccgacttgaccggctccaacctgacccggtggaagggcgctgttgatttccagcctccctcgaccggcctgggcaactacgccggcaggtatatccgcttcggtgtccgtgagcacggtatgggcgccatcctgaacggtctggccgcctacggcaccatcattccctacggcggtacctttctcaacttcgtctcgtacgctgcgggcgctgtccgtctgtctgcgctctcgcgcgtgcgcgtcatctgggtcgcgacccacgactcgatcggcctcggcgaggacggtcccactcaccagcccatcgagacgctcacccacttccgtgctctgcccaactgcatggtctggcgtccggccgacggcaacgagaccagcgctgcctactacgtcgctctcacctccaagcacactcccagcatccttgcgctctctcggcagaacctgccgcagctggagggctctgtcattgacaaggccatcaagggcggctacgtcctccacgagcaggaaggtgctgacatcacgctggtgtcgactggttccgaggtgggcatctgcgtcgacgccgtcaaggagcttgccaagcagaacatcaaggcccgtgttgtctcgatgccctgctgggaggtgtttgacacgcagcccaaggagtaccagctcagcgttctccccgacggtatcccgtcgctgtcggttgaggtcatgagcaccattggctgggagaggtatacccacgagcagtttggtctcaaccgcttcggtgtctcgggtgcctacaaggataagttcgagttcacccccgagggcgtcgccaagcgggcaattgccacgatcaacttctggaaggacgtgcctaacattcgctcgcccctcaaccgcgcattccagcagatcctctaa

SEQ ID NO: 5187 - protein, 681 aa, Myceliophthora thermophilia
MGYTDVDKLTINTIRVLAADATFHANSGHPGAPMGMAPVAHVLFNRFIRFNPKNPKWLNRDRFVLSNGHGCMLQYALLHLYGYDLTIDDLKAFRKVDSITPGHPEAHDTPGVEVTTGPLGQGISNAVGLAIAQAHTAAVFNKPGFDIVDNYTYCFLGDGCLMEGVSAEACSLAGHLQLGNLIAIWDDNKITIDGDTNQAFTEDVLKRYESYGWHILSVGDGDNDLEGIEAAIRKAQEVKDKPTLIQLKTIIGYGSKQQGTHGVHGSPLKADDIKQLKEKFGFNPEESFVVPQEVYDHCRKVAAAGAAKEEEWNKLLAKYAEQYKAEYEDLTRRLKGDLPEGWEKNLPTYTPADAAVASRKLSETVLNKIFDAVPELVGGSADLTGSNLTRWKGAVDFQPPSTGLGNYAGRYIRFGVREHGMGAILNGLAAYGTIIPYGGTFLNFVSYAAGAVRLSALSRVRVIWVATHDSIGLGEDGPTHQPIETLTHFRALPNCMVWRPADGNETSAAYYVALTSKHTPSILALSRQNLPQLEGSVIDKAIKGGYVLHEQEGADITLVSTGSEVGICVDAVKELAKQNIKARVVSMPCWEVFDTQPKEYQLSVLPDGIPSLSVEVMSTIGWERYTHEQFGLNRFGVSGAYKDKFEFTPEGVAKRAIATINFWKDVPNIRSPLNRAFQQIL

SEQ ID NO: 5188 - DNA, 1074 bp, Myceliophthora thermophilia
atggctaccctcctcgaccaattgcggacgctaagtagtgtcgacttggccgaacagtttggcccatttgttgactgcacctcaaaccaggccattgcgtttgccgagctatccaaagtcggcagcgatgggaaaccccttcaccgacagttgatcgccgactccctcaaggtcgctcactggcaatttggcaagcagaaagatgcaacgctagaggagctggcagtcgagctgatgatggtcaacctctcccttcggatggccccccacacaaccggttatgtacacgtgcagaccaacccaaagctggcctattccgccgaaaagacggccaagaatgccgagcgaatcatctcccacttcaagcagcttgcccctgactttgacaccagccgcgtctgcatcaagatcccgtctacctgggaaggtctccaagcctgtcgggagctcgagaagaagggcatcgccaccctggccaccattctcttcagtctcgagcagacggccttggcagccgccgccggatgccgctacatcgccccttacgtaaacgagttacgcgtgcacttcgactctggctacaccgaccccgaccccgccctcgccttcaccggcgtggcccaagcctacctcgactccctcccagataacagcgacacttacgacagcagcggcagcggcagcaacggcggtggcaaaagaaccaaagtcgtcgccgcctcgctgacctcagtcgaccaagtcatgcagctcgccggcgtccaccacatcaccattcccccccggctccttgccgagctcgcctctacgccggccgcaagctggcgcggcgccccagcacaagccgcgcgggccgttggcgcagcgggtgttgttgccccgccggcgggcgaggtccggcgtggtctcgaggccgcggtgcgcgacgaggcgctgtggcggatggcctttacgcgcgcagaaggcggtaggtgcgagggcaagctggcgcaggcactgagcatctttgcggacatgcaggagcggctggaggagatcgtccgccgggcggaaaggggcgaggagggagcatag

SEQ ID NO: 5189 - protein, 357 aa, Myceliophthora thermophilia
MATLLDQLRTLSSVDLAEQFGPFVDCTSNQAIAFAELSKVGSDGKPLHRQLIADSLKVAHWQFGKQKDATLEELAVELMMVNLSLRMAPHTTGYVHVQTNPKLAYSAEKTAKNAERIISHFKQLAPDFDTSRVCIKIPSTWEGLQACRELEKKGIATLATILFSLEQTALAAAAGCRYIAPYVNELRVHFDSGYTDPDPALAFTGVAQAYLDSLPDNSDTYDSSGSGSNGGGKRTKVVAASLTSVDQVMQLAGVHHITIPPRLLAELASTPAASWRGAPAQAARAVGAAGVVAPPAGEVRRGLEAAVRDEALWRMAFTRAEGGRCEGKLAQALSIFADMQERLEEIVRRAERGEEGA

SEQ ID NO: 5190 - DNA, 1482 bp, Myceliophthora thermophilia
atgaatcaagcagcgagccagcaatcataccaacaaccatatcaagaggccgaccgcgaagattccccgggcgtgcccggtgccgaactcctcgacgattacgagcagcgatacctaaattctttcttcggctccgtcgcctcggccagcaatggaacccctcttgccgcgcaagcgctgggcggcctttgcacccaggattggatgaagccggccgacgtcgttgggcacgtcgtgaggtttggagatccggacaatgcgttgctctcggaggcctttggcatgttcgacttttcgccgtcgacggatctcggcatcgccgcctcgacaacgcctggtttccccgataactaccagtcccagaatgggtcggcattccagcagttccagcaatcccagcaatcagagcagacccagagttactacgattccctgcatacccccgacgccgtcgccgccgccgctactctcgtaggccgcggcagcatgcccttcggcttgtaccctgaagtttcacactcgctgacaactgcctcgcaaaccatggtttcctcccaacccgacccgttcacactcggcaacggccgctacggcacgcaggctcaaatgtcgatggcgcgtcggacatctaatgcgccacgaacattatccgtcgacgtccaatacgggtcagatccgaatttcaccgacacgagctttgtgcccccatcagcgaaggagaccacagaggccatcacagcggagcagctggcgcatctccgctgcctagagccgagccacagcgctgcccccacgagagctgctagtcccacctcgtggggggcacaatactcgtcgaatgaggcatcacggaattcggtggtcgttccggtccgaaggacggtgtcgcacaacccgccgccgccggacgaaccgccaacaaggcgaaggaggacgagcaagatgggggaagcccccgtggatgcggagcaggcgatgcccacgcccgtcagccctacagccccgccattaacccagcgaaaacgaccgagcgcagcttcaccaccaccagcgccaccgtcaggaacagcgccaccacaaaacggcgacaaaccctccgccgcctccgcctccgaatccaacgggacaccatcagatcccacacaaacgaagaggcagcgaaaatcggggacgggcaagagtggtgccgggcgcaagaagtccccgcgcacgacgctcacgcccgagcagcgacgccagaaccacgtcggcagcgagcggcgccggcgcgactttatcgggcgcggctacgaccacctcatggccatcgtcccggggctcatgaacggcgccgccccgagcaagtcggtctcgctgaacctcgtggccgactggatagaagagttgcacaggggcaaccagacgctcgagaacatgatggcctttaccttcggccaggcgagcggctctactgctccttctgcgtctgctgccgctgcctaa

SEQ ID NO: 5191 - protein, 493 aa, Myceliophthora thermophilia
MNQAASQQSYQQPYQEADREDSPGVPGAELLDDYEQRYLNSFFGSVASASNGTPLAAQALGGLCTQDWMKPADVVGHVVRFGDPDNALLSEAFGMFDFSPSTDLGIAASTTPGFPDNYQSQNGSAFQQFQQSQQSEQTQSYYDSLHTPDAVAAAATLVGRGSMPFGLYPEVSHSLTTASQTMVSSQPDPFTLGNGRYGTQAQMSMARRTSNAPRTLSVDVQYGSDPNFTDTSFVPPSAKETTEAITAEQLAHLRCLEPSHSAAPTRAASPTSWGAQYSSNEASRNSVVVPVRRTVSHNPPPPDEPPTRRRRTSKMGEAPVDAEQAMPTPVSPTAPPLTQRKRPSAASPPPAPPSGTAPPQNGDKPSAASASESNGTPSDPTQTKRQRKSGTGKSGAGRKKSPRTTLTPEQRRQNHVGSERRRRDFIGRGYDHLMAIVPGLMNGAAPSKSVSLNLVADWIEELHRGNQTLENMMAFTFGQASGSTAPSASAAAA

SEQ ID NO: 5192 - DNA, 627 bp, Myceliophthora thermophilia
atgccgaaattcttctgcgactactgcgatgtctacctcacccatgactcgatgagcgtgcgcaaggcccacaacagcggccgcaaccacttgcgcaacgtagtcgactactaccaacagatcggccacgaaaaggcccagtccgtcatcgactccatcacgtcctcgtacgccgccgagggccaggcccacgccaaccccatgctcccccacaaccagcccggcggcggccacttcggcctcggcccggccggcgtgcccccgcctcccatgcccggcatgcccccgatcccgggcatgccgcccttccccggcgccccggccgggcccggcggcgccggggccgccgcccggcggtctgccgttccccccgcctcctggggcccccggagggtatcaggggtacccgccgccgccgggcgggtattcgggggagaagcgttgacgtactccatagatcaacgttgtaatgagccattctaccttgggagtcctagcggccagtgttgcgtctacgttgtcaagaactctcgcgcacgcgagataagaccagagattgcacagaatgaagagactcgacttgtcgtgggcacatccggtccacgagcatctcctaacttcagatga

SEQ ID NO: 5193 - protein, 208 aa, Myceliophthora thermophilia
MPKFFCDYCDVYLTHDSMSVRKAHNSGRNHLRNVVDYYQQIGHEKAQSVIDSITSSYAAEGQAHANPMLPHNQPGGGHFGLGPAGVPPPPMPGMPPIPGMPPFPGAPAGPGGAGAAARRSAVPPASWGPRRVSGVPAAAGRVFGGEALTYSIDQRCNEPFYLGSPSGQCCVYVVKNSRAREIRPEIAQNEETRLVVGTSGPRASPNFR

SEQ ID NO: 5194 - DNA, 1698 bp, Myceliophthora thermophilia
atgtcggcaatcccacagcccacgcaggctcctcctgcccaggaggacaacagcagcaacaacaacaataacaataacaacaatgacgccacggctccggctccggctccggctccggctgcggcagctccagcctcggcgacttcgaatcccgcttcaaccgacaacactccggcgccctcgactggggcggccgggagcgcgtcatccagcagcggccagaatgacaccttcccttgccactgggagggctgcaaggaagtgtgtcagactcccgaggctctctatgaacacatctgcgagaggcatgtcggccgcaagagcaccaacaatctcaacttgacctgcaaatggaaccagtgccgcaccacgacggtcaagcgcgaccacatcacttcccacatccgtgtccacgtgcctctgaagccgcataaatgcgacttttgtggcaagtcgtttaagcggccccaggacctcaagaagcacgtcaagacgcatgccgacgactcggtgcttgtcgccggtcgtggcccccaggaccagcctggcggcatgaacccaggctaccgcccccacccgggcaacaagcctccctccggcttctatgatcacaatggccatatgcgcgctactaacacgggccactttggccacccgcaccagaatggtcagcctagctactacggccagcagcagccgcccccccagccgacgtatcacacccccatgtactattcgcatcccatgggcggccctcgcaccgactacatgggccaccagccccaacgcttcaacgaggcccggaagcccgactttgagaccctgaacgagttcttcggtagcattaagcgcgcacagatcgacccccgctcgtattcccagatcggccgctctctgatgcctctccatgccaccctcggcctgcacgccggtggcggtctggctgccgagtacatgccgcaggctccccacactctgggcggcgtcggtggtgtctcgcacggtccgctcacccagcactattatctgccgccgatgcccaatcttcgcaccaaggaggaccttcagcagatcgaccacatgctggagcagatgcaggcgacaatctacgacaactcgggctctcccaacacccagtacgcgcctgttgacatgcgccactcgcccgcctactcttctcgcccggccgtcgacgggtacgccgtttcggccgcccaggtcatgtctccggtcagcgcgccgacccactcggacggcggcactccggccgtcaccccgccctcaagcaccttgtcgtacacgtctggccactcgcctaccgcctcgtcggccggcatgtcgccgtcgtcgcgccacagctcgacctcggtctcgtacccgagcctccccagccgcccgaacctgcccggtgcgcgccgcgacggcaaccaaacgcccacccccaaggcgcccgatggcgctgccgtgagctcgccgtccgaggggtcggaaggcggcgacaatgagacctatgacgagtggctgcataatgtgcgtgctgtcgagttcctgcgcaactacgtccgccagcgcctcgagcgtcacgactacgactcggactccgacgatggccgcgttgataacagccgcatcgaccccgctctggtcgaccgcagccgcgaccgcgtcaactacccctcgctgccgcccgtacagtaa

SEQ ID NO: 5195 - protein, 565 aa, Myceliophthora thermophilia
MSAIPQPTQAPPAQEDNSSNNNNNNNNNDATAPAPAPAPAAAAPASATSNPASTDNTPAPSTGAAGSASSSSGQNDTFPCHWEGCKEVCQTPEALYEHICERHVGRKSTNNLNLTCKWNQCRTTTVKRDHITSHIRVHVPLKPHKCDFCGKSFKRPQDLKKHVKTHADDSVLVAGRGPQDQPGGMNPGYRPHPGNKPPSGFYDHNGHMRATNTGHFGHPHQNGQPSYYGQQQPPPQPTYHTPMYYSHPMGGPRTDYMGHQPQRFNEARKPDFETLNEFFGSIKRAQIDPRSYSQIGRSLMPLHATLGLHAGGGLAAEYMPQAPHTLGGVGGVSHGPLTQHYYLPPMPNLRTKEDLQQIDHMLEQMQATIYDNSGSPNTQYAPVDMRHSPAYSSRPAVDGYAVSAAQVMSPVSAPTHSDGGTPAVTPPSSTLSYTSGHSPTASSAGMSPSSRHSSTSVSYPSLPSRPNLPGARRDGNQTPTPKAPDGAAVSSPSEGSEGGDNETYDEWLHNVRAVEFLRNYVRQRLERHDYDSDSDDGRVDNSRIDPALVDRSRDRVNYPSLPPVQ

SEQ ID NO: 5196 - DNA, 1611 bp, Myceliophthora thermophilia
atgtctgaaatgcactcctgggccagcgcagcgtcaccaagcatcaagttcgagggatcgcccgccgaatctattctctcgacccccgacgagatgtatccctccctgttcggcactagccctgcgccgacgactaccgttaacccggtcgacatgaggtcatcccagccggcacctcaactcccaaagcccgacctcacattactcgccggcctgacggcgttaacacataccaccttggccgcgcctccggccccgacaaccgtcaccccggagccggagaagaagccggtcaagaagaggaagtcgtggggtcaagtccttcccgagcccaagacaaacctgcctccaaggaaacgcgcgaagaccgaggacgagaaggaacagcggcgagtcgagcgtgtcctccgaaaccgccgcgctgcccagtcgtcgcgcgagcgtaagcgcctggaggttgagggtctggagaggaggaacaaggagctcgaggcggcgctcctgcaagcacagcaaatcaacctgaccctccttgaggaactccagaggatgcggggtggcagcggtgccaggacctcgccggccttcgaggccctccgcccaacccccgtcaccttctcgcagcaattgttcggctcccagggcgatcacaatcctgccatgggtagcaccagcacgctgcagcagatcttgcaatccatcccatcagccacgaacaaaacggtggacccatcgtcgctgtcgcccgcccttccacccatcccggaggcggcggaagaggagaacaagcagccggcggcgcccgccgctcctgttgcggatgcccccaccacggcccaggccatgtcggtcggcggaagcaccagcctcgccgtggcagcgggcgtcccagcaacagctacacccagcacagacgctgctcctccagctccagttcctgctggcttcgacctcggcgatggtttcaatatgccagaggcccttgacgcagatcgctatctccttgaaagcggacttctctcttcccccaactcaagcgattctgaatacgatcatctggctggtgacgacacctcgtcgtttccattcacgaccgacttcgacatcaacgaattcatcaccgacggcgagctccatggcgcgcccagcagcgagcagcagcagcagcagcaactccttggccgctctgtcgccgactcgtcactcctcaaccctgagactccgaacccttcggaagatccttacctgcagccccactctggcgcgtcccttgatggatgcgacgatggcggagcggacgagtctgcggcggcagcagtcagcggggtttcgccgcagcagctgccacgtcgcgggccgagtggatggctgaacggagccgcgctcccgtcgaaggaggtcctactcaccctcttgtgggtcctcagagtcgaagagcggaggcttcaaattcgcgaacaggccaaggccctgtcgaagcccggaacgtccggtgtcacccagacgacgacaccagccaacaagacaacattcgttttgaaagtattacgtaagcgagaggaggaagaacaagaccggcctgcttccctcaagaggcggcgctttcaatga

SEQ ID NO: 5197 - protein, 536 aa, Myceliophthora thermophilia
MSEMHSWASAASPSIKFEGSPAESILSTPDEMYPSLFGTSPAPTTTVNPVDMRSSQPAPQLPKPDLTLLAGLTALTHTTLAAPPAPTTVTPEPEKKPVKKRKSWGQVLPEPKTNLPPRKRAKTEDEKEQRRVERVLRNRRAAQSSRERKRLEVEGLERRNKELEAALLQAQQINLTLLEELQRMRGGSGARTSPAFEALRPTPVTFSQQLFGSQGDHNPAMGSTSTLQQILQSIPSATNKTVDPSSLSPALPPIPEAAEEENKQPAAPAAPVADAPTTAQAMSVGGSTSLAVAAGVPATATPSTDAAPPAPVPAGFDLGDGFNMPEALDADRYLLESGLLSSPNSSDSEYDHLAGDDTSSFPFTTDFDINEFITDGELHGAPSSEQQQQQQLLGRSVADSSLLNPETPNPSEDPYLQPHSGASLDGCDDGGADESAAAAVSGVSPQQLPRRGPSGWLNGAALPSKEVLLTLLWVLRVEERRLQIREQAKALSKPGTSGVTQTTTPANKTTFVLKVLRKREEEEQDRPASLKRRRFQ

SEQ ID NO: 5198 - DNA, 2625 bp, Myceliophthora thermophilia
atgtcggagccgagcgatcgcagcgagagccccgccgtcaccgagtcgcaccccgacaccaccaccaccaccacccacgaggaggcccatcacaacgacagggatgatcgcccgcccccgcgcaagcgccaacgcgtgaggctgtcttgcctcgagtgccgccgccggaagctgtcgtgcgatcgcgagttcccctgctcgcgctgtatccagtccggcactccggagcggtgtgagtatgagacccggcccggattagcgcctccgaacaagctcggtctgccgccgaccgccctggccggtctcgatgcccgcctgtccctgccgagcaccgggggggagtccccctacttccgcaaggacggccgcgagtcggaccgcatccgccggctggagctcgaggtcgcccagctcaagagcctcctggtcaagcaggtctcgctcgacggtagcaccgtccaggagcgctccccctcggacctccccaagtcggatgcagagcaggaggccgaggccgaggtgccgcccttcctacagacccaggtgacgactgccgacaaggaagagctccggtttttcaggggcaaggagttcaagacacgctatttcggcccgcatagtgcctatctagccttccaagaactcaccgggctgtgccctttcatgaaagagacctcggaggagtggttgcggccgttacacatccaccggaacaaggaccgccgcaaggacgccgaggagagggagcgcaagttccgcgcgcccgacccggccctcgaggccctgctcccttccaaggaggagacggataatctggtgaacatctacctaaaccaattcgagcaagttcaccgcatcgtccacatccccagcttccgtagagactatgcaaagttctggctcccctccgagacccgcagcgccgcctttaccgcgctcgtcctggccatcatgggcatctcgagctgcctgtcggcccagatgccgcacaagttcgaaaagatggtgtcgcactcgcacgcgaacgccatcaaatgggtcgaggccgtcgacgcgtggcaggagcgccagagccagaagcaccgccggctgatccactaccagatcgcctgcctcgtctacctggccaagcgggtcaacacgatgaagaagaagcgcttctggaagaacgcgggggccatgacgcaggacgccatctcggtaggcctgcaccgcgagcccagccacatgtgcgacaagatctcgcccttcaaccaggagatgcggcggcggatctgggccaccatccagagctacgacctgcaggcctcgttcgaccacggcctgccgtccatcctctgctcactccactatgacgttaacccgccacgcaacatcgatgacgacgagttcgacgaggacaccaaggaactgccgccctcgcgccccccgaacgagtacaccttctcgtcctaccagcacatcagccgtcagagcctgccgctccggctcgagctcagccgggttctcacgggccccccggaggagctcgactatgaccgggtgatccgctacaccaacgagatcaaccaggagatcgactcgctcccgtcctgggacgtgagcgaggcgtcatcccaggacccggtcgtaaagaagccgctcctcgcctacacactactgcacatccagctccgccagtacatcatcccgctgcaccagcccttcctccggctgcgcaagaccaactccaagtaccagtactcggagattatctactacaacgcggcgcgcgacatggtgctgctcaatgaccggctcgcgcagcaggggatccgcacgctcaacttcctgcgcgaggacagcctgacgctggccatcaacctggccagcgtcaccatgctgcagccgcgcggcagcaccaacatgatcatgatcaactcgcagcacacgctgcagctgctggagcgctgcttggccatgaaggaggaccgcatcctgcggtgcggcaacaacgagccgtgggggtacagcatgatgtgcgccacctttggcctgctcgaggcccacctgggcgtcaagacgcccgaggcggccaaggcggccagcgccgagcgctttgtgcacctgcactggaaactgctggccgggcaggatccgccgccggggagtcagcagagcgcttccgggggtgctgctggtgcctcgggtggatgttgcggagcgggaggaggaggaggaggaggaggcagtggtgccaacactggcgctggtgctggtgctgctgctgctgctggcggtcaaaccggggcagcggcgggtgaacagggcagggcggtggcggggacgccattttctagcacggggatgggaacatatcctgccgggccaggtccgtcgccggcggacgcgtttgtgaggtcgaagtcggtcactccgttcgcgccgtcgtcctcccagcaaggggctgggcagcagcagattgaggttcccggcacgccgtggtggatgcccaatacggcagaccagtctaccattccgcagatgttgcccttgaacccggacttcaacttcgagacattgggatttaacctcaacgagttgtggggcagcggcaactttgattgggactctatgatgccgtga

SEQ ID NO: 5199 - protein, 874 aa, Myceliophthora thermophilia
MSEPSDRSESPAVTESHPDTTTTTTHEEAHHNDRDDRPPPRKRQRVRLSCLECRRRKLSCDREFPCSRCIQSGTPERCEYETRPGLAPPNKLGLPPTALAGLDARLSLPSTGGESPYFRKDGRESDRIRRLELEVAQLKSLLVKQVSLDGSTVQERSPSDLPKSDAEQEAEAEVPPFLQTQVTTADKEELRFFRGKEFKTRYFGPHSAYLAFQELTGLCPFMKETSEEWLRPLHIHRNKDRRKDAEERERKFRAPDPALEALLPSKEETDNLVNIYLNQFEQVHRIVHIPSFRRDYAKFWLPSETRSAAFTALVLAIMGISSCLSAQMPHKFEKMVSHSHANAIKWVEAVDAWQERQSQKHRRLIHYQIACLVYLAKRVNTMKKKRFWKNAGAMTQDAISVGLHREPSHMCDKISPFNQEMRRRIWATIQSYDLQASFDHGLPSILCSLHYDVNPPRNIDDDEFDEDTKELPPSRPPNEYTFSSYQHISRQSLPLRLELSRVLTGPPEELDYDRVIRYTNEINQEIDSLPSWDVSEASSQDPVVKKPLLAYTLLHIQLRQYIIPLHQPFLRLRKTNSKYQYSEIIYYNAARDMVLLNDRLAQQGIRTLNFLREDSLTLAINLASVTMLQPRGSTNMIMINSQHTLQLLERCLAMKEDRILRCGNNEPWGYSMMCATFGLLEAHLGVKTPEAAKAASAERFVHLHWKLLAGQDPPPGSQQSASGGAAGASGGCCGAGGGGGGGGSGANTGAGAGAAAAAGGQTGAAAGEQGRAVAGTPFSSTGMGTYPAGPGPSPADAFVRSKSVTPFAPSSSQQGAGQQQIEVPGTPWWMPNTADQSTIPQMLPLNPDFNFETLGFNLNELWGSGNFDWDSMMP

SEQ ID NO: 5200 - DNA, 288 bp, Myceliophthora thermophilia
atgtcttcctccgattttagcatcgagcagtctgaccttgagaagcttagcgacaaggacaagaccgagctgcgccagttctttgccaacgaagagcaacgctctcgcattcagtcccaaacgcacgagcttacgggtatctgctggaagaagtgcatcactagcaccatcaagtccggcgcgctcgataagagtgagaagacctgcctggccaactgcgtcgaccgcttcatggacgccaacctcgccaccatgaggcaccttgccagcatgaggcagcagcactaa

SEQ ID NO: 5201 - protein, 95 aa, Myceliophthora thermophilia
MSSSDFSIEQSDLEKLSDKDKTELRQFFANEEQRSRIQSQTHELTGICWKKCITSTIKSGALDKSEKTCLANCVDRFMDANLATMRHLASMRQQH

SEQ ID NO: 5202 - DNA, 2220 bp, Myceliophthora thermophilia
atgacccaaacccaaagtcggcatctctattaccagcaacaacaccccgcccaatatcaccagcaacaacatcatcatcaaccacccgccgccgctgccgctgccgctgctgctgcctctgccttggacgatcccgccctgcgcacggcgtcgcctttggaagcaagcaagctggacgccctcgatttcgatatcgacctggacgccgacttcgatccggcccatcttaattacaacagcctgtcgtcgtcccccatctcgacccagtcgctgctgtctcagtactcgcctttgtcggcctttgacagcatcccgaccccgaccttggcggaaccttctttgtctcctccagtccgacaaagcggcctggccgccccagagtcatccgcgcctgccttgttctccaacggcggcgacgcgatgcaaacagacatgtggatgtcgaacggccagatcaccccgaggtccgtcggccggttctcacaccagcgggattcttctcgatcgtcgatgggttcgaacggcccggcctcgcccttctcccagaatacggcaaatccccacatcgccatgaacgattttggggacaacttccacggtcttcagggtgccgaggacctccaccattaccagctcgccgccaagcagtttcccggtgtgccgcccgacaatttctacccggggctcgcgcacgctaccgccgacaactctggtggcatgaccccgagctacccgtacctgtctacggcgccgaggcgcagaaacgaccgaggcctgctccccgagcatccgattgggcaggccacctcacagcccgtttcggtggcgagctctgtagcatctgactcacccgccacgccagcggtcgggtcggaggaggataggaaacgcaataatggtgagaccgaaccggatcccttcgagttcctagcgtgcaccccccgctcaccatcgcccgactccgcagcagctatgccacccatgcccaagctcgaccgcaccatgaccgacgcgtacgcggatgaactctaccaaccccaactcctcaactcgtcaacggcggcgacggcggcggcgacggcgacgacgatgacgacgacgacgacgactgctacgacaaatgcgggccaggcgtcattatcgccgaccagcgatctgttcaaccagcggctacaagcggccaacaagcagcacttgtctgctgtgaccaactcgccggtttcgtcgacgtctcgcgaccagtcgcccttccgccacgggtcgcctctggctccgctgcctaccagcgactttcgctctgccatgggtccttcgcagatacggttcaacacggcgcagcagatgcgagagcagaccaaggccatgcgggacgcccaggcggtgcagcagcatattgcacggtcggcggacacgtccaccccgcagacgatctcgcccaaggatgcgatgctcgacttccaggagcccgagggcgacgggaacttcccgctgttcccccagcaaagcaacacggggttcaacgccgaggccatcaacaaggcggccgcggcgcacagccagcaagtctttggcgggctaccgatggaccccaacgccttcaacagcttcctagggacgtcgatgccggcgaccatgcaggcgccgcagcagttcccttacctacctcagcagcggccgcagagcgctgtcccgtcggtgagcaacacgtcggcggcaacgacgcgtttcggatcagccgacacgggagcgaccgagtccgcccacggggtgacgccccaacggccggcagacactggcgccgacggcggcacctacacgtgtacataccacggctgcacgctgcggttcgagacgcccgcgctgctgcaaaagcacaagagggaaggccatcgacaggcccacggtctgaacggagcacggcgacccgaggcaggcgggatgacctcgagtctcctcaacacgcaagccggaccgcaccggtgcgaccggatcaaccccagcactgggaagccttgcaacacggtcttctcgcggccctacgatcttaccaggcacgagcataccattcacaacgcgcgcaagcaaaaggtccgctgcgacctctgcacggacgacaagacgttcagcagggctgatgcgctcacccggcactaccgagtgtgtcacccggatgtcgagttcccgggcaagcatcgcaggcgcggaggccacagcagctga

SEQ ID NO: 5203 - protein, 739 aa, Myceliophthora thermophilia
MTQTQSRHLYYQQQHPAQYHQQQHHHQPPAAAAAAAAAASALDDPALRTASPLEASKLDALDFDIDLDADFDPAHLNYNSLSSSPISTQSLLSQYSPLSAFDSIPTPTLAEPSLSPPVRQSGLAAPESSAPALFSNGGDAMQTDMWMSNGQITPRSVGRFSHQRDSSRSSMGSNGPASPFSQNTANPHIAMNDFGDNFHGLQGAEDLHHYQLAAKQFPGVPPDNFYPGLAHATADNSGGMTPSYPYLSTAPRRRNDRGLLPEHPIGQATSQPVSVASSVASDSPATPAVGSEEDRKRNNGETEPDPFEFLACTPRSPSPDSAAAMPPMPKLDRTMTDAYADELYQPQLLNSSTAATAAATATTMTTTTTTATTNAGQASLSPTSDLFNQRLQAANKQHLSAVTNSPVSSTSRDQSPFRHGSPLAPLPTSDFRSAMGPSQIRFNTAQQMREQTKAMRDAQAVQQHIARSADTSTPQTISPKDAMLDFQEPEGDGNFPLFPQQSNTGFNAEAINKAAAAHSQQVFGGLPMDPNAFNSFLGTSMPATMQAPQQFPYLPQQRPQSAVPSVSNTSAATTRFGSADTGATESAHGVTPQRPADTGADGGTYTCTYHGCTLRFETPALLQKHKREGHRQAHGLNGARRPEAGGMTSSLLNTQAGPHRCDRINPSTGKPCNTVFSRPYDLTRHEHTIHNARKQKVRCDLCTDDKTFSRADALTRHYRVCHPDVEFPGKHRRRGGHSS

SEQ ID NO: 5204 - DNA, 1005 bp, Myceliophthora thermophilia
atggcccagcctaccgactggaaagcgggggagattgcgcgtctggctgccgaatctcgggctgtcatcaagtcgcccgtatctggccttccgcagcgtcaccgcgacgtctttgagcgggctttgcgccgtgttctctctacagaactggcccaggtgacatacgcgcaaatcatcgatgggttccccctcgtcgaagtagctggggatatggcaggatggggcatcgaccgcgaacatcccgtctttcgcgacaaccacgataagctctgtcccggggcatgggagaggatggccgagttccactcttcgttcagcattgacgtcttgagcatggatgaaaaactcctgcattcctatgtcacagcagctattggctcccttgccttcaaaatgagactgctcgagatggttgcagtcgcagtgcaccagttggccgttatgctccacaagttgggggatttgggagtgcatgacgagtggaagacttggaagccccccaaccgttatatcgggccagactactgccctgacccggagccctttgcgaccctcttcttccatttcgacttcacagggcacgaacattaccctgaaggtatagccgacatggttggatactgggccgagaaccggatcctaggaggcgtggtgcttttcgaccgaggggagtctagcactaactcacaagaggtttatttccattcttgccgtcacaacgtgacgacccgcatatacgctctcacaagtgagcagaaaggaaggctttgggctttcctgctgtcggatggttcggatggtgaaaccaacgttttgccgattctcggcgactcgaagaacagagtccgtgtcgacacagaattcgccatccccgtgtttcacatctatagggacaagtgggaacgaaaagtcttgaatgactgggaaacgaggttagctcgtcgagattatttagacctggtagatgtcccagaggctgaggaccgtgagagctcggagccttag

SEQ ID NO: 5205 - protein, 334 aa, Myceliophthora thermophilia
MAQPTDWKAGEIARLAAESRAVIKSPVSGLPQRHRDVFERALRRVLSTELAQVTYAQIIDGFPLVEVAGDMAGWGIDREHPVFRDNHDKLCPGAWERMAEFHSSFSIDVLSMDEKLLHSYVTAAIGSLAFKMRLLEMVAVAVHQLAVMLHKLGDLGVHDEWKTWKPPNRYIGPDYCPDPEPFATLFFHFDFTGHEHYPEGIADMVGYWAENRILGGVVLFDRGESSTNSQEVYFHSCRHNVTTRIYALTSEQKGRLWAFLLSDGSDGETNVLPILGDSKNRVRVDTEFAIPVFHIYRDKWERKVLNDWETRLARRDYLDLVDVPEAEDRESSEP

SEQ ID NO: 5206 - DNA, 750 bp, Myceliophthora thermophilia
atgtccttcgccctggtcatgaggcgatcgggcctctcgatgggccgcaccctggcgcgcttcgagtcgaccgccagcaactcgacaacaacaaaggccgccgaggccgccaagcagaccgcctccaaggcctcgtcaaccgcgtccgaggcctcgtccaaggccgcccagggcctgtcgcgcgtcacggcggccgggggcccggccatcgtcagcgccgccaagggtgtctcgggtgcgctgagccgcgtgggcggccgcacaggacgtctggttgccttcgtcgagcgtaagaacgacaccccgccccgcctacctcgccctgccctgctccagaattcggcactcgagccccgctttgtttgcgtcgtcggtctcgtctcacctgctcccctcctccatttttgctgcgccccgtggggccagactcccttcgtcgtctactactccaaggtcggtcttgaactggccaagcttgtcttcaagggccaaaacatgaccccaccttccatttccacgttccagacctacttccagaacctgtggaagcagctgcagcaccccggcgccttcttctcgaacctcgcgcactcgctcaacccccagcagctccggaacctctcgaggacacaagtggcggccggcggcgtgctcctggccgagtgcctgggcttcttcaccgtcggcgagatgatcggcaggttcaagctgattggctaccatggcgagacccatgctgctcaccactaa

SEQ ID NO: 5207 - protein, 249 aa, Myceliophthora thermophilia
MSFALVMRRSGLSMGRTLARFESTASNSTTTKAAEAAKQTASKASSTASEASSKAAQGLSRVTAAGGPAIVSAAKGVSGALSRVGGRTGRLVAFVERKNDTPPRLPRPALLQNSALEPRFVCVVGLVSPAPLLHFCCAPWGQTPFVVYYSKVGLELAKLVFKGQNMTPPSISTFQTYFQNLWKQLQHPGAFFSNLAHSLNPQQLRNLSRTQVAAGGVLLAECLGFFTVGEMIGRFKLIGYHGETHAAHH

SEQ ID NO: 5208 - DNA, 909 bp, Myceliophthora thermophilia
atggcctggtgtctgtgggatatgctgacccatccgcgctacggcatggggaaacgtcttggtgcggcggatgtggataaatgggcgctgtatgtcatcggccagtactgcgaccagtcagtgccggacggctttggcggcacggagccgcgcatcacctgtaatgcgtacctgaccacacagcgtaaggcgtgggatgtgctcagcgatttctgctcggcgatgcgctgtatgccggtatggaacgggcagacgctgacgttcgtgcaggaccgaccgtcggataagacgtggacctataaccgcagtaatgtggtgatgccggatgatggcgcgccgttccgctacagcttcagcgccctgaaggaccgccataatgccgttgaggtgaactggattgacccgaacaacggctgggagacggcgacagagcttgttgaagatacgcaggccattgcccgttacggtcgtaatgttacgaagatggatgcctttggctgtaccagccgggggcaggcacaccgcgccgggctgtggctgattaaaacagaactgctggaaacgcagaccgtggatttcagcgtcggcgcagaagggcttcgccatgtaccgggcgatgttattgaaatctgcgatgatgactatgccggtatcagcaccggtggtcgtgtgctggcggtgaacagccagacccggacgctgacgctcgaccgtgaaatcacgctgccatcctccggtaccgcgctgataagcctggttgacggaagtggcaatccggtcagcgtggaggttcagtccgtcaccgacggcgtgaaggtaaaagtgagccgtgttcctgacggtgttgctgaatacagcgtatgggagctgaagctgccgacgctgcgccagcgactgttccgctgcgtg

SEQ ID NO: 5209 - protein, 302 aa, Myceliophthora thermophilia
MAWCLWDMLTHPRYGMGKRLGAADVDKWALYVIGQYCDQSVPDGFGGTEPRITCNAYLTTQRKAWDVLSDFCSAMRCMPVWNGQTLTFVQDRPSDKTWTYNRSNVVMPDDGAPFRYSFSALKDRHNAVEVNWIDPNNGWETATELVEDTQAIARYGRNVTKMDAFGCTSRGQAHRAGLWLIKTELLETQTVDFSVGAEGLRHVPGDVIEICDDDYAGISTGGRVLAVNSQTRTLTLDREITLPSSGTALISLVDGSGNPVSVEVQSVTDGVKVKVSRVPDGVAEYSVWELKLPTLRQRLFRC

SEQ ID NO: 5210 - DNA, 348 bp, Myceliophthora thermophilia; identical to SEQ ID NO: 5156

SEQ ID NO: 5211 - protein, 115 aa, Myceliophthora thermophilia; identical to SEQ ID NO: 5157

SEQ ID NO: 5212 - DNA, 633 bp, Myceliophthora thermophilia
atggcgcagaaaggaggcacgctgagcctcaaccatcagccaagtctgcctcagcaggggacggccgatggttggatcccggatctgatttctgcagtccacatgctcgtggatgccctgctcggtcacgctgttgtgacagttcctacacctcgtggagctggtccgtactacacacaacgatgtggcgagacctacgcggtgtacatggagaaggacaaggccggccctatcgagaacggggtggcaaaggcaggctcagaactcggctgcaatccgttcctctgccggggctaccagtacgaggacaatgaagcggtggaatacgagccgggtcaagtcatcgacttccacgtcgacctcattgctgggcaccacccgggctatgcgaacgtctcgatcgttgacctggaagcaaacaagatcatcggcgatcccttgaggtcctgggatgactatccaaacgcgacagcgacgacgcctcggtcagacatcgatttcaacgtgaccatcccgaacacgctcggtacggcatgcagcaccggcggcaagtgcgccatccaatggtactggtatgcgagcgggaacaagcagagttacgagagctgcgtcgatttttacgtcaaggcttga

SEQ ID NO: 5213 - protein, 210 aa, Myceliophthora thermophilia
MAQKGGTLSLNHQPSLPQQGTADGWIPDLISAVHMLVDALLGHAVVTVPTPRGAGPYYTQRCGETYAVYMEKDKAGPIENGVAKAGSELGCNPFLCRGYQYEDNEAVEYEPGQVIDFHVDLIAGHHPGYANVSIVDLEANKIIGDPLRSWDDYPNATATTPRSDIDFNVTIPNTLGTACSTGGKCAIQWYWYASGNKQSYESCVDFYVKA

SEQ ID NO: 5214 - DNA, 213 bp, Myceliophthora thermophilia
atggatagttggagatatgatcaaagagggcacaccatcgagctcagcatgatcaggaggattgaattccaccaaacttccaacttcagaacgcgcaacctgctgatcgagtactacatcgtcgagtcgcatggggagctggcgcccaacgagccgtggacggccaggcactttgaccagtggaccacccttggcatgccccagggtacctaa

SEQ ID NO: 5215 - protein, 70 aa, Myceliophthora thermophilia
MDSWRYDQRGHTIELSMIRRIEFHQTSNFRTRNLLIEYYIVESHGELAPNEPWTARHFDQWTTLGMPQGT

SEQ ID NO: 5216 - DNA, 2286 bp, Myceliophthora thermophilia
atggcgcagccacgatactattcagacgacgagatggccgcgagccaacctcttggcgggccgggcccgactcctccgcgccatcgccagtttcaacaatcgtactacgagtactaccaagacgcgcacgaccgcccgccgtcgcagtaccagcccaggccacaagcagatccgtccttcgacaggcttcgctcccagagacgctacaaccaagaagccgcaaacggcgggcgaggagggacaggccaatacgccgcggccggcacaacactaccgagcgaatacagcggccacggccacccggcatccccacctcgggcatctccacaacgcggtacagagagacgttcctggggacaagccacctcgtatccgccacaggcccaacgcccttctccccagagcacaatcgcaccaggagccgacaatttcagcaacgctgccgccggaggcatggctggtatcgccctgacaggcgcagaacagaacgcaggagagagcggcctcgacgccattcacggtcaacaacaacaacaacaacaaccaccaccaccaccacctcatcaacaacaaccataccaccagtacggaaacggacgcggagacggctacggagaaaggggcatgctctcccccggcagcaactacccgggagacagaaattcacacgcgagcttgcaagggctcgccgccgcgcccctcgggtcgggatactccactccgggctcgcgaacctcgtctaggatcggggtcgacatctacacggacgatccttaccagaattactcgcggcaccaagactcggacctgggggtcgtcaacccgcacgacatcatcgacgacggcgacgacggtctcgaatacggacggtccgccgcgcggaccagcatgctcagcatcggatccaaacgtgacagccacggtgccgctgccgtgggcggcgcaggcaccggcggtgtcctcggagggttggtcggccggaacgggagcggcagcgtgagcaaccaatacgcgcccgtcagcacggcggcgcccggcgacgctgcttcgggcgggtcgggcggcggaggagggatatacaccgccgccgccgtcggtggcgggctgccgggcgggcgagaaagggcggcgttgcacagcgccgtctccaaggggcagcggccggggcaggaagtggaagttcgccatcctgatcgccctcgccgtcgctatcgtcgccggcgtcgtcctgggcatcttgttcggcgtcgtgctgagggacgaccacaagggcggcagcaagagcggcgccggctcgggacgacagcgaacggcgacctcgacgccgactcgtccgagatccaggcgctcatgaacaacccggacctccgcaaggtcttcccgggcatggactacacgccgctcaacacgcagtaccccgactgcctcacgaacccgccgtcgcagaacaacgtgacgcgcgacatggcggtcctctcgcagctgaccaacgtcgtccggctctacggcaccgactgcaaccagaccgaaatggtgatccacgcggtcaaccagctcaagctccaggacgaggtcaagatctggctgggcgtgtggcaggacaagaacgagacgaccaacgcgcggcagctgaggcagatgtggaacatactggacaagtacggcaccagctacttcaagggcatcatcgtggccaacgagatcctcttccggcaggagatgaccatcacgcagctgggcagcctgctggaggaggtgcggcacaacctgacggagcgcaagatgtcgctgcccgtggcgacgagcgacctgggcgacaactggacggccgggctcgcggcgcagagcgacgccatcatggccaacatccaccccttcttctcgggcaccaaggtgaccgaggcggccgactggaccatgtacttctggggcaacaagacgagcgggttcctcaagaaggacgagagcatgaacatcatcgccgagacgggctggccgtcgagcggcggcaccaactgcggcagcgactacgtgaccgaatgcccggacggcgccgtcgccggcatcgacgagatgaaccgcttcctcgaggactgggtctgccgcgcgctcgaggacgggaccgagtacttctggttcgaggccttcgacgagccctggaagattcgcttcaacgagcccggcaaggagtgggaggacaagtggggcctcctcacggtcgaccggaagctcaaggacggcctcaagatcccggactgcggggggaagcgggtgtcgtcgtcgtag

SEQ ID NO: 5217 - protein, 761 aa, Myceliophthora thermophilia
MAQPRYYSDDEMAASQPLGGPGPTPPRHRQFQQSYYEYYQDAHDRPPSQYQPRPQADPSFDRLRSQRRYNQEAANGGRGGTGQYAAAGTTLPSEYSGHGHPASPPRASPQRGTERRSWGQATSYPPQAQRPSPQSTIAPGADNFSNAAAGGMAGIALTGAEQNAGESGLDAIHGQQQQQQQPPPPPPHQQQPYHQYGNGRGDGYGERGMLSPGSNYPGDRNSHASLQGLAAAPLGSGYSTPGSRTSSRIGVDIYTDDPYQNYSRHQDSDLGVVNPHDIIDDGDDGLEYGRSAARTSMLSIGSKRDSHGAAAVGGAGTGGVLGGLVGRNGSGSVSNQYAPVSTAAPGDAASGGSGGGGGIYTAAAVGGGLPGGRERAALHSAVSKGQRPGQEVEVRHPDRPRRRYRRRRRPGHLVRRRAEGRPQGRQQERRRLGTTANGDLDADSSEIQALMNNPDLRKVFPGMDYTPLNTQYPDCLTNPPSQNNVTRDMAVLSQLTNVVRLYGTDCNQTEMVIHAVNQLKLQDEVKIWLGVWQDKNETTNARQLRQMWNILDKYGTSYFKGIIVANEILFRQEMTITQLGSLLEEVRHNLTERKMSLPVATSDLGDNWTAGLAAQSDAIMANIHPFFSGTKVTEAADWTMYFWGNKTSGFLKKDESMNIIAETGWPSSGGTNCGSDYVTECPDGAVAGIDEMNRFLEDWVCRALEDGTEYFWFEAFDEPWKIRFNEPGKEWEDKWGLLTVDRKLKDGLKIPDCGGKRVSSS

SEQ ID NO: 5218 - DNA, 2688 bp, Myceliophthora thermophilia
atgtccgcttttatcgtcacgtacccgccgctcggccaagttacgcagctccagaactctgaactgacgatccatgcggttctggagattcctcctgaatctactacggagaattggcagcttgctctctggtattccaacggagatcaggaggaatgggaagaagcagtcttagttccctctatccacgatgtccgtcccacggaactacacgaatccattggagccgcggcgaggttgtacttcacgacccgggtagtcgtcaggtcctcgttaaccttcaccatcaagtttcgtcaaggcaccgatgaccaagaatggaaatgggttcgcagcgagcagggctcgggtgatgccattgtgatcatcaaccagaaaccaactcgagaggacgaccccgaggacctgcctgacctgattcgggatctgaatccggagctggaatggaaacgccacatgagccagtctcctggaacgcgcctgtggactgttgaggcacaagtacacggggcaaaggaggatgaatcagcgtttgtcgaagtaccactgggcattccgtggggcgggcggttcctcagatggtttgccctggttcggtcctggaccccatggcttgctcccagacacggcaagtcagagttcggcctggacaaggatggcttactttcgtatgccatatgtgtcccctggggctctgtgctgcaaggactgaggttgacccagcttcgaaacgataatgtgaaatcaacaacaggaacggttctggtagccgtcggtgacaaccttgagaacgcggttgctgccgtcatgtaccacgcccggacccttgttacggcagcgaatgctccaaattctcacggtatagcctcgcccacggcagagggcgatgtcgggccgcaatggtatgaaaattggtacgacggtttgggatactgcacatggaactcgttgggccagcagttgaccgaggagaagatcctgaatgcactagacacgttggccgagaacaaggtcaacatctctaacctgatcatcgatgacaactggcaagacattgactaccgcggcgacggccaatggcagtacggctggaacgacttcgaagccgagccgagagccttcccccggggcctcgaagccctcgtctccgacatccggtccaagcacaagaacatacagcacatcgcagtctggcatgccctcctaggctactgggccggtctcgccccctccgggccccttgtcaaacgctacgaaaccgtccaggtctcacgcgacgacacccaaaagtcccacctccccatcggcaacgccatgacggtcgtcgctccttccgacgtccaggacttctacgaagacttctaccgcttcctcacctcctgcggcatcgacggcgtcaagactgacgcccagtacatgctcgacacgctcacccagcccgccgcccgccgcacccttactagctcctacctcgacgcctggacctcctccaccctcggccacttcgccgggggccccgtggtcgcgggcatggcgctgtccccgcccacgctcttccacccccgcctgttccgcaccagcctgccgcagattgtgtgtcgtacctcggacgacttcgtcccgaccggcggcggcgacgacagcgacgacgacgcgcacccgtggcacgtgtggaccaacgcgcacaacgcactgctcgcgcagcacctcaacgcgctgccggactgggacatgttccagacggcacacccgcggggcgggttccacgcggcggcgcggtgcgtcagcggcgggtctgtttcacgacgaggagctgctgctccagatcacgggcgccacgtcgcgcggcgcggcgggcccgtctgcgtcacggacccgcccggccagcacgacgaggagctgctgcgccagatcgcgggcgccacgccgcgcggccgcaccgtcgtcttccgccccagcacggttggccggaccctggacgcctacagctcccgcgcggacggcggcggcggcgggttgctcaaggtcggcgcgtaccacggccgtgccgggacgggcacgggcatcgtggccgtgttcaacgtcgatccgcggggtaaccggccggtggccgagctcctgcccctcgcccgtttccccggggttgggacgggtacgggtgcgggtgaggggggcgcgggcgggaggtacgtggtgcgggcgcaccgcagcgggaaggtgacgcctcccttgcggcccgggtcgccggccgctctggtgacggtctctctcgaggcgaaggggtgggacgtgctgtctgcctatccgctgcatgcggtgcagtcggggacgaggggggaggtgttgcttgcgaacctggggctggtgggcaagatgacggggtgtgcggcggtgctgaggaccgtgttcgaggcgcgcgagaacgggaggatgttggtggatgctaccgtgaaggcgctaggggtgttgggcgtctacatctcggtcctccctgaactctcgatcaacgacgacttcatggtgaccattcgggggcagccgataccccctcacactgtgtccgtgagccggcaagacgagcgcgtcctggaggtggatatcgaaacagcgtggaccgaaatgggcctcgagagcggctgggcgaacgaggtgcaggtcaaggtctactttgccctggagaagaagtag

SEQ ID NO: 5219 - protein, 895 aa, Myceliophthora thermophilia
MSAFIVTYPPLGQVTQLQNSELTIHAVLEIPPESTTENWQLALWYSNGDQEEWEEAVLVPSIHDVRPTELHESIGAAARLYFTTRVVVRSSLTFTIKFRQGTDDQEWKWVRSEQGSGDAIVIINQKPTREDDPEDLPDLIRDLNPELEWKRHMSQSPGTRLWTVEAQVHGAKEDESAFVEVPLGIPWGGRFLRWFALVRSWTPWLAPRHGKSEFGLDKDGLLSYAICVPWGSVLQGLRLTQLRNDNVKSTTGTVLVAVGDNLENAVAAVMYHARTLVTAANAPNSHGIASPTAEGDVGPQWYENWYDGLGYCTWNSLGQQLTEEKILNALDTLAENKVNISNLIIDDNWQDIDYRGDGQWQYGWNDFEAEPRAFPRGLEALVSDIRSKHKNIQHIAVWHALLGYWAGLAPSGPLVKRYETVQVSRDDTQKSHLPIGNAMTVVAPSDVQDFYEDFYRFLTSCGIDGVKTDAQYMLDTLTQPAARRTLTSSYLDAWTSSTLGHFAGGPVVAGMALSPPTLFHPRLFRTSLPQIVCRTSDDFVPTGGGDDSDDDAHPWHVWTNAHNALLAQHLNALPDWDMFQTAHPRGGFHAAARCVSGGSVSRRGAAAPDHGRHVARRGGPVCVTDPPGQHDEELLRQIAGATPRGRTVVFRPSTVGRTLDAYSSRADGGGGGLLKVGAYHGRAGTGTGIVAVFNVDPRGNRPVAELLPLARFPGVGTGTGAGEGGAGGRYVVRAHRSGKVTPPLRPGSPAALVTVSLEAKGWDVLSAYPLHAVQSGTRGEVLLANLGLVGKMTGCAAVLRTVFEARENGRMLVDATVKALGVLGVYISVLPELSINDDFMVTIRGQPIPPHTVSVSRQDERVLEVDIETAWTEMGLESGWANEVQVKVYFALEKK

SEQ ID NO: 5220 - DNA, 2037 bp, Myceliophthora thermophilia
atggcagcgcaattctcgactcaaaacgagagtcacatgcggaagcagggcggtggttacctgccaatcgaaaactatggcttgataggtaacatgagaacctgtgctatggtgggcatggacggcagcgtcgacttcatgcctgagttcgactcaccaacagtcttctgccgtctcctggataaggataagggaggctacttcagcatccagccggcttcccatctcagctgcaccacgaagcaacagtatttgccatcatctaatatcctgcagacccgctacatccacgaggatggcgtggttgaccttgtcgacttcttcccccggccgaagaacgccaaggttatcttcaagggccccaagcagggcgcctaccgcgagatgacgagcgtccaggaggagctgaagcagtggctagtccgtcgcgtcgagtgcgtccgcggccgtctccagctggacgttgagatcttccctgcatttggttatgcgaccgagccgcacaccaccactatcctgcaggaggagggtgtcccgcactgcaaccagagcaagacggcggcgttccacagcgagagcaccaagctacagctcgatgtcatcatcgaccatggagaggacggcgacgatagctggcccatcgtccgtttcaggaaagtcttgaagcccggcatgctcggcgagggcgtcgtcgcctgtatcgacatcagcgagggacaggccgtgtctttcgtcatacggaacgacgtggagaagcacgtcacggaaaacatcacaagcgccgtgctcgacacgcagcagcacgacactcaaacgtactggtacaactggatctccacgagcaagtacaagggccgctggcgtgaggtggtgtcacgcagcctcatgatcctgaagctcatgacgtacgagccgacgggggccatcattgcagccccgaccttctctatccccgaagctatcgggggcgtccgggcaagcaactgggactaccgcttctcgtgggttcgcgacgcgagcttcaccatctacatcctgctgcgcctgggcttcaccgaggaggcggacgcctacatgggcttcatcagcgagcgtttcctcaagtcgcgcgtagccgacggcgggctgcccatcatgttcaccatccgcggcgagaccgacatccccgagcgcgagctgacgcacttggacgggtaccggggcagcagaccggtgcgcatcggaaacggggccgccttccaccagcaattcgacatctacggcgagcttatggacgccatctacctgtacaacaagtacggcaagccgatccactgggatctgtggtgcacggtccgagagatgctcgactacgtgctcaccatcatgcaccagcccgacatgtccatctgggaggtgcgcaacaacaagcagaacttcacctactccaaggtcatgctctgggtggccttcgaccgcggcctgcgcctgtcggaaaagcgcaacttcccgtgccccaacagggtcaagtggctcgccgctcgggactcgctgtacgaggagatcatggagaaaggctacaacaaggagatgaagtgcttcgtgcagagctacgagaacaataccatgctcgactcgtccatcctgatcgccccgctcgtcttcttcatcgcccccaacgacccgaggttcctcaacaccatggatcgcatcatgctgcccccggagaagggcgggctgaccagcaccggcctggtgtaccggtacaacacggaggtgtccgaagatggtgttggcggccacgagggcgcgttcagcatgtgcacgttctggctggtcgaagccatgacgcgggcgtcggtctacgaatccaagtacctcgtgcgcgccatcaacctgtttgagaacatgctcagcttctccaaccatctgatgatgttctccgaggagatctcgcggagcggcgagcagctgggcaacacgccgcaggccttcagccacctggccctcatcagtgcggcctttaatctggaccgcgtctcggagcccaagaagtag

SEQ ID NO: 5221 - protein, 678 aa, Myceliophthora thermophilia
MAAQFSTQNESHMRKQGGGYLPIENYGLIGNMRTCAMVGMDGSVDFMPEFDSPTVFCRLLDKDKGGYFSIQPASHLSCTTKQQYLPSSNILQTRYIHEDGVVDLVDFFPRPKNAKVIFKGPKQGAYREMTSVQEELKQWLVRRVECVRGRLQLDVEIFPAFGYATEPHTTTILQEEGVPHCNQSKTAAFHSESTKLQLDVIIDHGEDGDDSWPIVRFRKVLKPGMLGEGVVACIDISEGQAVSFVIRNDVEKHVTENITSAVLDTQQHDTQTYWYNWISTSKYKGRWREVVSRSLMILKLMTYEPTGAIIAAPTFSIPEAIGGVRASNWDYRFSWVRDASFTIYILLRLGFTEEADAYMGFISERFLKSRVADGGLPIMFTIRGETDIPERELTHLDGYRGSRPVRIGNGAAFHQQFDIYGELMDAIYLYNKYGKPIHWDLWCTVREMLDYVLTIMHQPDMSIWEVRNNKQNFTYSKVMLWVAFDRGLRLSEKRNFPCPNRVKWLAARDSLYEEIMEKGYNKEMKCFVQSYENNTMLDSSILIAPLVFFIAPNDPRFLNTMDRIMLPPEKGGLTSTGLVYRYNTEVSEDGVGGHEGAFSMCTFWLVEAMTRASVYESKYLVRAINLFENMLSFSNHLMMFSEEISRSGEQLGNTPQAFSHLALISAAFNLDRVSEPKK

SEQ ID NO: 5222 - DNA, 1344 bp, Myceliophthora thermophilia
atggcaattgcggtttcaccgtcgcaacacgggggagatctcggttttctgctgggtgagcagcgccagccgccacggcagcgcgttgtagtcaccctcgtccttggccgggtcgaggccctggtagaggaagcgcagcgactccgacacgtcgatcgtcagcgtctgatcggtcagcttgcggatcacctcgccgtggctgatgctcctcatccacgaactgtcacgccaagactatatataattcccgaggaccagacttgtttcgtgattaagtggtggcagtcatttccccagaaatgcacgccaggaactgcatggcttgcctgtggcacgggcgaccacccgctgacggcgagctgggtggaaaaggggctcatcaagaccaactgggacaccttttcgctcgacacatccacctttgtcgccaacggcacgcgctacctggtctgggcgcaacaggagccgtcgcggcctgacgagaactcgagcatcatgatcgcgccccctcgagaacccctggacgatcggcggcacggccgttgccatctcccgcccaaccctgccgtgggagcgtatcggcgcaacggcaaggtctttctgacgtgctcggccagtgccagtgcgacggactccaactactgcatgggcatgccgacggcgacggagggatcggacctgctgaacccggcctcatggagcaaatcgcagaaccccatcttcgccagcaatccaaagaccaatcaatggggaccgggtcacaacttgtttgttgtgtcggaggacgggttaagcgacatcctagtgtatcatgaccgcgggtacaaggatatccgaggcgacccgctcaatgatccgaaccggcggacaaggatgcagaagctgtactggaaggaggacggaacgccagactttggggtgcccgtgccggaagggaacacaccagtgcggctgcggtcagccgcagggttgggccaggacgtgaggtactacacgggcagcgacggtccgacggacacgccggcgctggctgatacccagtttcgtatcgccagtcccgggttggcgggcgggagtatggtcagcctggagtcgacgagcaacccgggcatgtttgtgcgccgggcggacgatggaagtgcgcagtttgtaagcagcgatgcgctgggctcggcttctgccaaagcatcggccagcttcaacctcgtccccgggttggccgacgtctcgttcgaagcgtcggatgcgagtgaccagtatcttcggttggaagcaagcggacgactcacgacggtacaggctggggaggatgctcaggagcaggcaaccttctttttggagtag

SEQ ID NO: 5223 - protein, 447 aa, Myceliophthora thermophilia
MAIAVSPSQHGGDLGFLLGEQRQPPRQRVVVTLVLGRVEALVEEAQRLRHVDRQRLIGQLADHLAVADAPHPRTVTPRLYIIPEDQTCFVIKWWQSFPQKCTPGTAWLACGTGDHPLTASWVEKGLIKTNWDTFSLDTSTFVANGTRYLVWAQQEPSRPDENSSIMIAPPREPLDDRRHGRCHLPPNPAVGAYRRNGKVFLTCSASASATDSNYCMGMPTATEGSDLLNPASWSKSQNPIFASNPKTNQWGPGHNLFVVSEDGLSDILVYHDRGYKDIRGDPLNDPNRRTRMQKLYWKEDGTPDFGVPVPEGNTPVRLRSAAGLGQDVRYYTGSDGPTDTPALADTQFRIASPGLAGGSMVSLESTSNPGMFVRRADDGSAQFVSSDALGSASAKASASFNLVPGLADVSFEASDASDQYLRLEASGRLTTVQAGEDAQEQATFFLE

SEQ ID NO: 5224 - DNA, 2787 bp, Myceliophthora thermophilia
atgagcaccttggatggcgatttggacccactatggcaggacctcgactgggccatcggtcagatgctgattatgggatgggatgggaccgaagtcacaccccagatccgtactctaatcgagcagcatcacctgggctcggtcctgctaacggcaaagaacctcaaatgttccgccgagcaaacggcaagactcgtccaggagctccagaccatcgcccgtcaggccggccatccctaccccctgctgattgccctcgaccaggagaatggcggcgtcaacagcctctttgacgaggactacatctgccagttccccagctccatgggccaggctgccgccagcagtgccgacctggcctacaagatcgccaaggccaccgctaccgaagtctcggccgtcggtgtcaacctgatcttgggaccagtgctggacgtgctcaccaatgcgcgctaccagccgctgggcgtgcgagcgaccggcgacgacccccaagaggtctcccagtacggcatcgccgctatgaacggctacaaggacgccggcgttgccacctgcgggaaacacttcccttcctacggcaacctggattttctcggctccagcttggacatccccatcatcacccagaccctggaggaactctctctgagcgcccttgttcccttccgcaacgccatcgccaccggcaagctggacgccatgtttgtcggtggctgtggcatcgcgaacccgtccatgaacgtcaaccacgcgtgtctgtctgaacaggtggtcgacgacctgctcagaaacgagctcggcttccaaggtgtcgccatctcggagtgtttggagatggagggtctcaggaacgagattggcgtcaaaacgggcacggtcatggcagtcgaggccgggtgcgacttggtcatgctctgtcgcgcctacgatgtgcaactcgaggccatttccggcctgaaactgggcgtggagaatgagctcatcacgaaagagcgcatctacacgtcgctcaggcgaatcgtccgcatgaagaagtcgtgcacttcctggcagaaggcgttgaaccctcccggcatcagcttgctgtccaagatccatccgggccacctcgcactctcgctgaaggcctacgacgactccatcgccgtcatacgagacaacgaaaagctgctccccttgacctcttccatgcaccaggaagaggaactgctgctgctcacgccactggtaaggccgctaccggcttcctccatgaccaaggcgttgctggagaagaaacaaatcgaccccgtaacactccacgacaaatgggtccaccgtgatcggggagccatcatgagcggcgagggagtatttcgcgagctcggaagatccctcgctcgtgcaaggcatgggaagctgctacatacatcttacaccgcgaacggtgtcaggccagtacacgaaaacctcatcaaccgagcctcgtgtatcatcatcgtgacggcggacgccaaccgcaacctgtaccaggcaggctttacaaagcacgtctccatgatgtgctcattgctgagggcaaatgggcagaagaagtcgctcatcgtggttgccgtcagctccccttacgacttcgcgatggacaagtcggtcgggacctacatctgcacctttgacttcaccgagacggctatggccgctctcgtacgggtcttatgcggcaagatcaagccccggggcacactgcccgggaccctcaggaagagcagaaaggtgctcaaatccaggcagcactggctcgtcgagccgtacgaccgcgaccgagacgccaaggggttacaggacctcctacaatccttggccagagcgagcgcgcctgcccaccagttcctgcagaccacgagcgcgcattcctttgagctgttcagccccaacatcgaggaagcccacttcgtagtgcgcaacagcagcactcaggcgctctacggcttctgcgcaacctactttgtccaagggacgggaattatcggcgctctctttgtcgaccccgccaagcgcaatgtctccatcggcaggtccctccaacggcgagccctgcgcggcttgacccagaagcgcggcatcaagaaggtacagctgggcatgtccttcccgggcgtcttcctaggcatccccgcggacgacagcgccgggctcaagcagtggtttaccaacgggggttgggacctgcagttcccacggcgcctcgtcaacatggccgtctcatctctcaacagctggattgcccccgaagggctgctgcagagcatccagcgcgccggcatcaccttcgacctcatccacggcctggacaatgccgacaacgtgctggcccacgtcagcgcacacgcaagcccggaggtgctggagctgtaccgcttcgcgctgcaagagaccaagagctgcggtgtcgtccgggccaagggccacgccgaggcgctgcttggcacggtaatcgtctgcaagcccgggagcaccctggccagcttcatcccgcccctgcagccctctccggcgcggcctgacgagcctgtcggggggatcgtgagcccgatcgtggcgccgtcgtcggctcaggcaaccttggtgctgcagggtctcgccctgatgggcctgcggcagaacaagacgcacaagtcgctaaaaagtgtgctgagctgggtgcaggatgacgcgcatgagccactgttggctatgggattcgaagtggtgcaggtctttgaggagtttacgaattcgccggataattggcaggacttttcttga

SEQ ID NO: 5225 - protein, 928 aa, Myceliophthora thermophilia
MSTLDGDLDPLWQDLDWAIGQMLIMGWDGTEVTPQIRTLIEQHHLGSVLLTAKNLKCSAEQTARLVQELQTIARQAGHPYPLLIALDQENGGVNSLFDEDYICQFPSSMGQAAASSADLAYKIAKATATEVSAVGVNLILGPVLDVLTNARYQPLGVRATGDDPQEVSQYGIAAMNGYKDAGVATCGKHFPSYGNLDFLGSSLDIPIITQTLEELSLSALVPFRNAIATGKLDAMFVGGCGIANPSMNVNHACLSEQVVDDLLRNELGFQGVAISECLEMEGLRNEIGVKTGTVMAVEAGCDLVMLCRAYDVQLEAISGLKLGVENELITKERIYTSLRRIVRMKKSCTSWQKALNPPGISLLSKIHPGHLALSLKAYDDSIAVIRDNEKLLPLTSSMHQEEELLLLTPLVRPLPASSMTKALLEKKQIDPVTLHDKWVHRDRGAIMSGEGVFRELGRSLARARHGKLLHTSYTANGVRPVHENLINRASCIIIVTADANRNLYQAGFTKHVSMMCSLLRANGQKKSLIVVAVSSPYDFAMDKSVGTYICTFDFTETAMAALVRVLCGKIKPRGTLPGTLRKSRKVLKSRQHWLVEPYDRDRDAKGLQDLLQSLARASAPAHQFLQTTSAHSFELFSPNIEEAHFVVRNSSTQALYGFCATYFVQGTGIIGALFVDPAKRNVSIGRSLQRRALRGLTQKRGIKKVQLGMSFPGVFLGIPADDSAGLKQWFTNGGWDLQFPRRLVNMAVSSLNSWIAPEGLLQSIQRAGITFDLIHGLDNADNVLAHVSAHASPEVLELYRFALQETKSCGVVRAKGHAEALLGTVIVCKPGSTLASFIPPLQPSPARPDEPVGGIVSPIVAPSSAQATLVLQGLALMGLRQNKTHKSLKSVLSWVQDDAHEPLLAMGFEVVQVFEEFTNSPDNWQDFS

SEQ ID NO: 5226 - DNA, 2655 bp, Myceliophthora thermophilia
atggcagcacctgcatcagtggaaaatgtcgacctcaggcaggatatcgacccaaatgcgtcgccggccggcagcatcgacaccaatacaacccctgataccgaattctcgcctccggaaagccctctccagcggggcggaccgcccaaggatgcgaggaaactggcgagaaccaagctggccaccttgacgacggaagaaaaggtatctctcctgacagccgcagacttctggagaacaaaagcgattccatccaagaacatcccggcagtaaagacgagtgatgggcctaacggcgctcgcggtggcatctttgtggggggcacaaaagctgcgcttttcccctgcggtatctcgctggcagcaacatggaataaggatctcctttaccaggttggccagcaccttgcggacgaggtcaaggctcggtcggccaatgtcctgctcgcccctacagtctgcatgcacagacacccgctgggtgggaggaactttgagtctttctccgaggatcctctcttgtgcggcaagctggctgcccagtacatcaagggtctccaggagaaaggcgtcgccgctaccataaaacactttgtcggaaacgagcaggagacgaacaggatgaccatcaactcgatcatcgccgaacggccgcttcgcgaactctaccttcgcccgttcgagattgcggttcgcgaggccaagccgtgggctctcatgagttcttataaccttgtcaacggcgtccacgcggacatgaacacgcacatcctcagggatatcctccgcggtgagtggggatacgatggaaccatcatgtcggactggggaggcgtcaactccaccgtcgaatcgatcaaggccggatgcgacattgagttcccgtactctgacaagtggcgcttcggcaaggttcttgacgccctcaaggaagggaagattgccgaggccgatatcgaccgggcagccgagaacgtgctcactctggtcgagcggaccaagggcagcgacctgacggccgaggccgaggaaagagaggacgaccgcgaagagacgaggaatctcatccgcgaagcgggcgtgcaggggctcaccctcctgaagaacgaggggtccatcctgcccatcgacccggccacggccaaggttgccgtgatcgggcccaatgccaacagggcgatcgcgggaggcggcgggagcgccagcctcaacccgtactacaccacgctgcccctggacagcatccgcaaggttgccaagcagccggtcagctacagccaggggtgccacatccacaagtggcttcctgttgcgtccccctactgctccgacaagacggggaagcagggggtgtcgatcgagtggttcaagggcgacaagttcgagggccagccggtcgtgttccagcggcggaccaacaccgacctcttcctgtgggactcggccccgctcgcccaggtcggcccgcaatggtcggccatcgtgacgacctacctgacgcccccgagcacgggcaagcacaccatctcgttcatgacggtcgggccgggcaggctctacgtcaacgggcagctcgcgctggacctctggaactggaccgaggagggcgaggccatgttcgacggctcgatcgactacctcgtcgacgtcgagatgcaggcgggccggccggtggagctccgggtcgagatcaccaacgagctgcgcccgatcgccaagcagaagcagttcgacatgacgcacaagtacggcggctgccggatcgggttcaagcccgaggacaaggtcgactacctgcaggaggccgtcgatgcggccaaggcggccgacgtcgccgtggtcatcgtcggcctggacgccgagtgggagtcggagggctacgaccgcaagagcatggacctgccctcggacgggagccaggaccgcctcgtcgaggccgtcctcgcggccaacccgcgcaccgtcgtcgtcaaccagtccggctcacccgtcaccatgccctgggccgaccgcgtgcctgccattatccaggcgtggtaccagggccaggaagccggaaacgccctcgccgccgtgctctttggcctcgacaacccaagcggcaagctcccgtgcaccttcccccgacgtctcgaggacacgcccgcgtaccacaactggcccggtgagaacctggaggtcatctacggcgagggcatgtacatcgggtaccggcactacgaccgggtcggggtggcgccgctgttcccgttcgggcacgggctgtcgtacacgacgttcgagtacgggcggccgtcggtgagcccgaaggtgctcggcccggacgggggcgcgatcgagctggtggtggccatcagcaacgtcgggccggtccggggcctcgagacggtgcaggtgtacgtgcgggacgagcggagccggctgccgcgaccggaaaaggagctcgtcgcgttcgagaaggtcgagctcgagccgggcgagaccaagcacctgcgcatcccgctcgacaagtacgccgtcggctactacgacacggccctgcgccgctgggtggccgagcagggcaccttccgggccctggtcggtgcctcggccgcggatatcaagtatgatgtcgcgtttgaggtcaaggagacgtttacctgggttttctag

SEQ ID NO: 5227 - protein, 884 aa, Myceliophthora thermophilia
MAAPASVENVDLRQDIDPNASPAGSIDTNTTPDTEFSPPESPLQRGGPPKDARKLARTKLATLTTEEKVSLLTAADFWRTKAIPSKNIPAVKTSDGPNGARGGIFVGGTKAALFPCGISLAATWNKDLLYQVGQHLADEVKARSANVLLAPTVCMHRHPLGGRNFESFSEDPLLCGKLAAQYIKGLQEKGVAATIKHFVGNEQETNRMTINSIIAERPLRELYLRPFEIAVREAKPWALMSSYNLVNGVHADMNTHILRDILRGEWGYDGTIMSDWGGVNSTVESIKAGCDIEFPYSDKWRFGKVLDALKEGKIAEADIDRAAENVLTLVERTKGSDLTAEAEEREDDREETRNLIREAGVQGLTLLKNEGSILPIDPATAKVAVIGPNANRAIAGGGGSASLNPYYTTLPLDSIRKVAKQPVSYSQGCHIHKWLPVASPYCSDKTGKQGVSIEWFKGDKFEGQPVVFQRRTNTDLFLWDSAPLAQVGPQWSAIVTTYLTPPSTGKHTISFMTVGPGRLYVNGQLALDLWNWTEEGEAMFDGSIDYLVDVEMQAGRPVELRVEITNELRPIAKQKQFDMTHKYGGCRIGFKPEDKVDYLQEAVDAAKAADVAVVIVGLDAEWESEGYDRKSMDLPSDGSQDRLVEAVLAANPRTVVVNQSGSPVTMPWADRVPAIIQAWYQGQEAGNALAAVLFGLDNPSGKLPCTFPRRLEDTPAYHNWPGENLEVIYGEGMYIGYRHYDRVGVAPLFPFGHGLSYTTFEYGRPSVSPKVLGPDGGAIELVVAISNVGPVRGLETVQVYVRDERSRLPRPEKELVAFEKVELEPGETKHLRIPLDKYAVGYYDTALRRWVAEQGTFRALVGASAADIKYDVAFEVKETFTWVF

SEQ ID NO: 5228 - DNA, 630 bp, Myceliophthora thermophilia
atgccgaacaagccggacccgtcctgggccgccgcctacgccaaagccatcgactttctctccagcctcaccctgacggagaaggtcagcctcacgacgggcacgacgggatggcaggcggatcgttgtatcggcaacatggggggcgtgccccgcctgggattctcgagactcaggggcgaggcgatcggagccgagttcagggccccgacccctatcttgctggtgtcgccatggccgagtgagtccattcgggggattcagagccgcggagtggtggccactgccaagcactattgtgcgtgcgagaatgagtggacgtccaactacctgctcaagaacgaactgggctctccggggttcatcatgtcggactggggacctgggcatcccttcgcggttccgacgagcaactgggagatcacggatcgggcaaagactgtctttgtgggctctaacgtgagcgagggacatacacctgagttcgacactgcccgcgcccaaagggatgtcatggaggcacggctgagcccatcattgtatatacaggatgaacggcaacacacggctctcctgaattcttggtattacaacaacatcatcatcatcaggttggctggctgtacataa

SEQ ID NO: 5229 - protein, 209 aa, Myceliophthora thermophilia
MPNKPDPSWAAAYAKAIDFLSSLTLTEKVSLTTGTTGWQADRCIGNMGGVPRLGFSRLRGEAIGAEFRAPTPILLVSPWPSESIRGIQSRGVVATAKHYCACENEWTSNYLLKNELGSPGFIMSDWGPGHPFAVPTSNWEITDRAKTVFVGSNVSEGHTPEFDTARAQRDVMEARLSPSLYIQDERQHTALLNSWYYNNIIIIRLAGCT

SEQ ID NO: 5230 - DNA, 696 bp, Myceliophthora thermophilia
atgaactatctcgcccattgcaccaatgacgactgcaagtctttcaagggcgacagcggcaacgtctgggtcaagatcgagcagctcgcgtacaacccgtcagccaaccccccctgggcgtctgacctcctccgtgagcacggtgccaagtggaaggtgacgatcccgcccagtcttgtccccggcgaatatctgctgcggcacgagatcctggggttgcacgtcgcaggaaccgtgatgggcgcccagttctaccccggctgcacccagatcagggtcaccgaaggcgggagcacgcagctgccctcgggtattgcgctcccaggcgcttacggcccacaagacgagggtatcttggtcgacttgtggagggttaaccagggccaggtcaactacacggcgcctggaggacccgtttggagcgaagcgtgggacaccgagtttggcgggtccaacacgaccgagtgcgccaccatgctcgacgacctgctcgactacatggcggccaacgacgacccatgctgcaccgaccagaaccagttcgggagtctcgagccggggagcaaggcggccggcggctcgccgagcctgtacgataccgtcttggtccccgttctccagaagaaagtgccgacaaagctgcagtggagcggaccggcgagcgtcaacggggatgagttgacagagaggccctag

SEQ ID NO: 5231 - protein, 231 aa, Myceliophthora thermophilia
MNYLAHCTNDDCKSFKGDSGNVWVKIEQLAYNPSANPPWASDLLREHGAKWKVTIPPSLVPGEYLLRHEILGLHVAGTVMGAQFYPGCTQIRVTEGGSTQLPSGIALPGAYGPQDEGILVDLWRVNQGQVNYTAPGGPVWSEAWDTEFGGSNTTECATMLDDLLDYMAANDDPCCTDQNQFGSLEPGSKAAGGSPSLYDTVLVPVLQKKVPTKLQWSGPASVNGDELTERP

SEQ ID NO: 5232 - DNA, 504 bp, Myceliophthora thermophilia
atggcctccgcaacaaccttttatgacttcaaggtcgcagacaagaagggcgccgaggtgtcccttgccgactacaagggcaaggtcgtcctcatcgtcaacacagcctccaagtgcggttttaccccgcagtacgccggcttggagaagctgtggaagacggtgcgcgagaagtacccggacgacttcgtcatcctgggcttcccgtgcaaccaattcggcgggcaggaacccggcaccaacgaggagatccaggagttctgccagctcaattacggcgtcaccttccccatcatggccaagattgacgtcaacggtgacaacgccagccccctgttcgagtggctcaagaatgagaagcccggcttgctggggctgaagagggtcaagtggaactttgagaagttccttgttggcaaagatggcagagtgaagggccggtgggcgtcgaccacgaagccggagtcgttggaggcgaccattctggaggagttggcgaagtaa

SEQ ID NO: 5233 - protein, 167 aa, Myceliophthora thermophilia
MASATTFYDFKVADKKGAEVSLADYKGKVVLIVNTASKCGFTPQYAGLEKLWKTVREKYPDDFVILGFPCNQFGGQEPGTNEEIQEFCQLNYGVTFPIMAKIDVNGDNASPLFEWLKNEKPGLLGLKRVKWNFEKFLVGKDGRVKGRWASTTKPESLEATILEELAK

SEQ ID NO: 5234 - DNA, 339 bp, Myceliophthora thermophilia
atgataaacacgctcgccaaccacgaaatcctgccccgcgacggcaggggaattactaaggacgtcgtcatcagggccatgaagcagggcctcgacttcgaccttgctttggccgtcatcatgttcgaccaggccgtcatcgccaacccggagcccaacgccaccttcttcaccctggacgaggtggtccgggtggaagccatcctgcgcatctcggacatgatcggagaggcgacgagcctcctgacacgcgacccgggcggagggcctgcagccaacgtcacgagacggactcccctacgtagggggttccatgccagcgtgagactggaagagtga

SEQ ID NO: 5235 - protein, 112 aa, Myceliophthora thermophilia
MINTLANHEILPRDGRGITKDVVIRAMKQGLDFDLALAVIMFDQAVIANPEPNATFFTLDEVVRVEAILRISDMIGEATSLLTRDPGGGPAANVTRRTPLRRGFHASVRLEE

SEQ ID NO: 5236 - DNA, 3315 bp, Myceliophthora thermophilia
atggcgcggatacacaatagagggaaagccaatggagccgtgggggtggatagcatcaatgccaactcgacggcatccgtcgacaaggccgagaagctagccagcaaagcaaagcccaagccagtcccgctcaagctgaaaccgacaaaggctgaccggaaaggcgttgccaatgccttcgaacgacatgcccaggtcatccacgccaaggtagaaccaccggcgagccaggccggtgcgggtaccgctccgagacgatggggcaagctcagcaccgtcctgaagacactgcggtcaaatgattggaagaccctgaagacaatgatactgaaaaaagtgaagggcgagcttttgacggacgacaagaccatgctcatggagcacatcattcagctcgtctcgaacctgcccagcgactcgaaactccgggttgaactgaccaacaacttcctgagcgagctctggtcctcgttggagcacccgcctccccggtatctcagtgacaagtacaagtaccgccaagctgacggctcgtacaataacatcatgtttccgcagctcggcgcggccggatcagtatatgcgcgttccgtgaacgccagcgtcttgcgaccgggcgcgctgccggatccgaacctgatctacgactctgtcatgaagcggaccgagtacaaaaagcatccgaacaacgtgtcgagcattctctggtactgggcgagcatcatcatccatgacttgttctggacagatcacaaggacatgaaccgatccaagacgtcctcctacctggacctgtctcccctttacggcagcaaccaggagatgcaggataccatccggacgttcaaggacggcaagctcaagcccgactgttttgccgacaagcgtctgctcggaatgccccccggcgtcggcgtgttgctgatcatgttcaaccgcgttcacaactacgtctgcgacaatctcattgccatcaacgaggacggcaaatttacaccggcatctccgaatcttacaggagaggaggcggcgaccgcttggaaacggtacgacaacgacctcttccagaccgctcgcttgatcacctcgggtctgtacatcaacatcaccttgttggactacgtgcggaacattgtcaacctgaaccgcgtcgacacgacttggaccttggatcctcgccaagataccggcatcgatgtcgggaccagcaagggtgccgagcgcggcacgggcaatatcgtgtctgccgagttcaacctctgctacagatggcacagctgcgtctcggagaaggacgacaagtggatcgaggagttctactacgacttgtttggcaaaccgggctccgaggttaccgttcaagacctcatcatgggcttcgccaagttcgagagcaggcttcccgaggaccccctcgagcgcccgttcaacgggttcaagagaggacctgatggcaagttcgacgacgacgacctggtggaatgcatcacgtccgccatcgaggattgtgccggctcctttggtgcgcggaacgttcccgcatcgatgcgcgccattgagattctgggcatcatccaaggccgcaagtggaacgttgctggcctgaatgagttcaggagacactttggcctcaagccctacgagacgttcgaggacatcaactcggatcccggcgttgccgaggcgctacgccgtctgtacgaccatcccgacttcgtggaactctacccgggcctggtcgccgaggagcacaagcagcccatggttcccggtgtcggcattgcgccgacttacaccatctcccgtgtcgtcttgtcggatgctgtctgcctcgtccgcggcgaccgtcactacaccgtcgattacaatgcccgcaacctcactaactggggctacaacgacgtccagtatgacctcagtatcaatcacggctgtgtgttctacaagttgttcatccgggccttcccgcatcacttcaagtacaactcggtctatgcgcactatccgatggtggtccccgcggagacccagaagatcttgaaggacctcaagcgcgatcacctgttcgactttagccgtccgacgcgcatcgcccaggacgtcgagtgcacatcggtcgaggcggcccgacgggtgtttgccagcccagacaagtacaagccgtcgtggcatgccagcgttgacgcccttgcccccgagggcaagtccaagctgtcggccgacgccgctttccacgaccgccaccggcgcgaagtcagccagccgttggccactgctgactttgtatctcaagtcaaggcattctatgccacagtgacggagcagttgcttgacagccagagctatcatcttggcggcctcaagctcgcggatcttgtccgcgacattggcaatatcgcgcccacccgcttcgtctccgcgctgtttaacctgccgttgcagaccgaggacaaccccaagggcatctaccgcgagcatgagctatacgtcgtgctatctgtcatcgcggaggccgtcttcaccaaccccgatccggtcaagaaattccccttgttcgaagcagccaagacggtggcagcacagctggcctccgcggttgagcggaccgtcaagaacccgaaggcgaagaagaaggacccgctgagcacgtatggcgcccggctcatcaaaggcctgtctaaggccggccttaacactcacgacatcacctggggccacgtcttgacttccagcgcggctattgccccgtaccaggccaaacttttcgccgaagctgtcgacttctacctctcgccccgcggcgccccttatctggaggcagtccggtctctcgccgcccagccggcgtccgagcaggccgattcccttctgctaggctacgctcttgaagctgtccgcctctcagggtccacaaagctgcactttgaggccaccgcggccgactcgctccctgcagaggacgggacccagattcaagtccaaccgggcgaccgcatcgccgttacatcctccgccgcctccgactcggaggacgatccctcgcgcccccgcgagagctacgtccacctcgcgggcctgcccaacagctcgttcctgggcacccgcgagatcggctacgccgcgctgaccgcgatgttccgcgcgctcttcaggcgccccaacctccggcgcgccccgggcccgcagggcgagctgaagagggtcgtcggcgtcgacggcgccagccccggtgccgtcgagtacctgcgcgaggactggggcgtcaagggcccgtggccggtcacgatgaaggtctgctgggatgagaatgtctga

SEQ ID NO: 5237 - protein, 1104 aa, Myceliophthora thermophilia
MARIHNRGKANGAVGVDSINANSTASVDKAEKLASKAKPKPVPLKLKPTKADRKGVANAFERHAQVIHAKVEPPASQAGAGTAPRRWGKLSTVLKTLRSNDWKTLKTMILKKVKGELLTDDKTMLMEHIIQLVSNLPSDSKLRVELTNNFLSELWSSLEHPPPRYLSDKYKYRQADGSYNNIMFPQLGAAGSVYARSVNASVLRPGALPDPNLIYDSVMKRTEYKKHPNNVSSILWYWASIIIHDLFWTDHKDMNRSKTSSYLDLSPLYGSNQEMQDTIRTFKDGKLKPDCFADKRLLGMPPGVGVLLIMFNRVHNYVCDNLIAINEDGKFTPASPNLTGEEAATAWKRYDNDLFQTARLITSGLYINITLLDYVRNIVNLNRVDTTWTLDPRQDTGIDVGTSKGAERGTGNIVSAEFNLCYRWHSCVSEKDDKWIEEFYYDLFGKPGSEVTVQDLIMGFAKFESRLPEDPLERPFNGFKRGPDGKFDDDDLVECITSAIEDCAGSFGARNVPASMRAIEILGIIQGRKWNVAGLNEFRRHFGLKPYETFEDINSDPGVAEALRRLYDHPDFVELYPGLVAEEHKQPMVPGVGIAPTYTISRVVLSDAVCLVRGDRHYTVDYNARNLTNWGYNDVQYDLSINHGCVFYKLFIRAFPHHFKYNSVYAHYPMVVPAETQKILKDLKRDHLFDFSRPTRIAQDVECTSVEAARRVFASPDKYKPSWHASVDALAPEGKSKLSADAAFHDRHRREVSQPLATADFVSQVKAFYATVTEQLLDSQSYHLGGLKLADLVRDIGNIAPTRFVSALFNLPLQTEDNPKGIYREHELYVVLSVIAEAVFTNPDPVKKFPLFEAAKTVAAQLASAVERTVKNPKAKKKDPLSTYGARLIKGLSKAGLNTHDITWGHVLTSSAAIAPYQAKLFAEAVDFYLSPRGAPYLEAVRSLAAQPASEQADSLLLGYALEAVRLSGSTKLHFEATAADSLPAEDGTQIQVQPGDRIAVTSSAASDSEDDPSRPRESYVHLAGLPNSSFLGTREIGYAALTAMFRALFRRPNLRRAPGPQGELKRVVGVDGASPGAVEYLREDWGVKGPWPVTMKVCWDENV

SEQ ID NO: 5238 - DNA, 2952 bp, Myceliophthora thermophilia
atggatcagttctccctttcggccgccccgccacccattcctcgcagatctagtgagcgcgaacgtgtccggtccggcaaccaatctcccgaccgccgcccgcgtgattcttcttcttgttaccccgccaaagccgccaaaccaaggcgcgaccgagactacgacgacgtcttcgccgactggactagccgaagtcgcgaccggcacgccgaccgccaccacagggatcaagaagacgaccaagtcggccccctgccgcccgcgtcccccgaggtcatctcgtccctcatcacgtccctgtctaccatctccaggccagtgagcaatcacttcgacggcccctcatacctcagccctataggcgtggggagccccgtctctctgtcgcccgtgagctcgcccgccggtggctcgtttggtgtcgactacggtgcctactcgaagccgtcgctcaaggagctggaggaagaggatgtgcccctagaggatcttccagccagcgccccggtcgttcggacgtccaaaccacccagcggcctgtcgcccgtgaccggccctaggtcgcccaagagcccgagcgcccgcgattcgtccggcttcagaggcatcctctcgcgccggagcagcggcgccctgtcccgcccgtcgagcaaaggatcgataacgtccggcgccgagagcatcggcaagctcagcatcgagcgtagccaggaacctctttcgcccgcagccgaaggacacggcctcaagaaccaacaatcgcacgacagctggggaaagaaaggtggtcggaaccagcgcggccttatgtacatgaccagcaaggagaggttgcgagagaaggaggccgacaagaagcgagccagcatcggtacgggaggaggaaacggaaagagactcagcgcggccagcgggcccacgacgccgcgtctcgatccgctgtccgcggactctgtcattgatgaggagccggcgggagacttttcccttgggctagatggtccgatcgacgcctttgcagaccctcggctgatacccgccagggattcatcgctagggaggaagaagagatcttcagctagagcatctcgaacgtcgaaacgggatagcgagagcggcggttacggtgcgatcccggagctcgaggaacaacccaacgggaattcgggctggcaaggcgactcgaccaatcggcggagctccaagaaccgcgaggggctcgaccctttgagtctcactattagcttgccgccggacccggcttctccgaacaatcgacgcgtctccgccacgagcccatccacacccgcggccggcatgtttccggacattgacctcgacgacggcgccccttccccttctgtcgcccaggggcgccgtcgggatcgggaagctagcgccgagtaccggcggcggtccggccggcacacccccgatccgtttggtggctacgcgagtgaaggaggggggacaacggacaagaaaaagcgaagcagctctaagctcaggcggctgtcgggggcacctagcccgacgccggatagcgcagaacagggcactgcgacagggaacaacaggcacagcgaccagccacacgtcgcctatgagcggccgcggagcgccgacagtatcgacgaagcggtggaaaagtatctatgcagcccgcggctgagccagaagatcaggcaccctcagagcggtcggatcgtcagctttagcgaggttggggacccgaacgggagcgccgtcttctgctgcgtcggcatgggcctgacaagatacatcaccgctttctacgacgagttggccctgactctgaagctgcgtctgataacccccgatcgtcctggagtcggcgacagtgagccgtatgctgagggcaccgcaacgcctctaagttggcccgatgacgtgtatgccatttgtcaagcactcaagatcaccaagttctctatccttgcacactccgccggtgccatctatgcgctggcgaccgctctccgcatgccccaacacattcggggcaggatacatctactcgcgccctggataccgccgtctcagatgaacgtagtcggagccagcgacaagacgccgttgccaccgacgaacgccatccccactagccagaggatattaagagccctcccgacaccaattctcaaagccgccaacagcagtttcatgacggcaaccagctcaagcatcaccagctcgctgccaaagcagaagcgggtcaagcgagacaagaggggcaacgggaccgggaccagggataacaaggatcagccgaagggcatgttccatgcagcgcttgagaacaaggagaacctgaaccccgataacctgaatagcaagtactccaccattccagcagcggccgacgaggatgcgaacgggggggcgcccgaggggtcgaacgccgctgccagcgcgccccagacgcacggcatcggccaccgccacttccgccctagcgtgtcccggcaggggtccaacccgcggcgggagtcggaggatcctatcctcccggcgagtgcgcagatggaggaccgcgagcggcaggagctgtatgacaaccgcctgacgcacgcgatctggcagctcgcgacgacgggcgccaaccctgccgtcgatctgctggtgtgcctagagcggcggcacaccatcggcttccgctacgtcgacatcaccaggccggtcgtgatccaccacggcagccgggacacgcgggtgccggtggagaacgtgaggtggctcggcaagacgatgcgccggtgcgaggtgcgggtgctcgagggcgagggccacggtctgatggcgagcgcccaggtcatgggcagcgtgctcatggagatcagcagggagtgggaggaatggtcccgggtcacgggggcgaccaggagagagcacgagagggcgaggagaaacacggtcggacaggggaagtag

SEQ ID NO: 5239 - protein, 983 aa, Myceliophthora thermophilia
MDQFSLSAAPPPIPRRSSERERVRSGNQSPDRRPRDSSSCYPAKAAKPRRDRDYDDVFADWTSRSRDRHADRHHRDQEDDQVGPLPPASPEVISSLITSLSTISRPVSNHFDGPSYLSPIGVGSPVSLSPVSSPAGGSFGVDYGAYSKPSLKELEEEDVPLEDLPASAPVVRTSKPPSGLSPVTGPRSPKSPSARDSSGFRGILSRRSSGALSRPSSKGSITSGAESIGKLSIERSQEPLSPAAEGHGLKNQQSHDSWGKKGGRNQRGLMYMTSKERLREKEADKKRASIGTGGGNGKRLSAASGPTTPRLDPLSADSVIDEEPAGDFSLGLDGPIDAFADPRLIPARDSSLGRKKRSSARASRTSKRDSESGGYGAIPELEEQPNGNSGWQGDSTNRRSSKNREGLDPLSLTISLPPDPASPNNRRVSATSPSTPAAGMFPDIDLDDGAPSPSVAQGRRRDREASAEYRRRSGRHTPDPFGGYASEGGGTTDKKKRSSSKLRRLSGAPSPTPDSAEQGTATGNNRHSDQPHVAYERPRSADSIDEAVEKYLCSPRLSQKIRHPQSGRIVSFSEVGDPNGSAVFCCVGMGLTRYITAFYDELALTLKLRLITPDRPGVGDSEPYAEGTATPLSWPDDVYAICQALKITKFSILAHSAGAIYALATALRMPQHIRGRIHLLAPWIPPSQMNVVGASDKTPLPPTNAIPTSQRILRALPTPILKAANSSFMTATSSSITSSLPKQKRVKRDKRGNGTGTRDNKDQPKGMFHAALENKENLNPDNLNSKYSTIPAAADEDANGGAPEGSNAAASAPQTHGIGHRHFRPSVSRQGSNPRRESEDPILPASAQMEDRERQELYDNRLTHAIWQLATTGANPAVDLLVCLERRHTIGFRYVDITRPVVIHHGSRDTRVPVENVRWLGKTMRRCEVRVLEGEGHGLMASAQVMGSVLMEISREWEEWSRVTGATRREHERARRNTVGQGK

SEQ ID NO: 5240 - DNA, 933 bp, Myceliophthora thermophilia
atgccagaaacccgctatttcgtcctccccgaccagcggcaggtcgcatacggcatctacggcgcacaggatgcggcctcgaccgtgttctactttcacggatgcccgtcctcccaccacgaggcattcttgctgtccgaggccgggcggcgccacggcctgcgcatcatcgcgccttctcggccgggcagcggcggctcggcgttccgcgagaacggcacgcttctcgagtacgccgacgacgtcctcgcgctcgccgaccacctcgacgtcccccgcttcggcatcgtagccgtgtcgggcggcgccccctacgcgttcgcctgtcggaagcgcatcccgcgcacgcggctgacggcggtcgggatcgtggccgggatctacccggttaccagcttcggcacggccgggatgaagctgccgtcgcgggtcatgctccggcttgccacgtggttcccgagcatcgtggcctgggccatcgacaggcagctgggcgcggtggcccgggacgaggacgggaagaagaagctggaggcgctgttggtagcagatatgcagcaggaggcgacctgggagagcgacaagctggcctgggaagcggcagctccggaagctcgggaggccgtagtcatgggcatccgggagggcgtgaggtatgggggccgcggccccgcttgggagatgaagttgtacgcaagccattgggggtttgagttagacgaggtccggccgggccatgagaacgagcttgttctgtggcacggagacctggacgccaatgtgccgctggccatggcggaaaaggctgcccggcaactcggtccggatgcgggattgagggttgttgagggccagggacatggggccctcacattccacagggctgacgagatcatgtcgacaatgagggataatatgctaagggcgatttga

SEQ ID NO: 5241 - protein, 310 aa, Myceliophthora thermophilia
MPETRYFVLPDQRQVAYGIYGAQDAASTVFYFHGCPSSHHEAFLLSEAGRRHGLRIIAPSRPGSGGSAFRENGTLLEYADDVLALADHLDVPRFGIVAVSGGAPYAFACRKRIPRTRLTAVGIVAGIYPVTSFGTAGMKLPSRVMLRLATWFPSIVAWAIDRQLGAVARDEDGKKKLEALLVADMQQEATWESDKLAWEAAAPEAREAVVMGIREGVRYGGRGPAWEMKLYASHWGFELDEVRPGHENELVLWHGDLDANVPLAMAEKAARQLGPDAGLRVVEGQGHGALTFHRADEIMSTMRDNMLRAI

SEQ ID NO: 5242 - DNA, 942 bp, Myceliophthora thermophilia
atgcctatggaactgcgcaagcgcaaggaggccccggcgcctccacctccggtgcggaggaagatgaccaagacggccaagacggataccgcctccaaagccaagggagacgctgaagagaaggcggccccggtcgccgcaagcaccaatggctcctcttcatccggcgtgcccaccgtgggcgatatcatcaacctcgacggattcggcggcgagatcgagaccaacgacggcaccaagaccaccctcaaatccctcgttgatgcgagcaaggcgggcgtggtcatctttacctatcccaaggcttccacaccaggatgcacccgccaggcctgcctcttccgcgactcgcacgaggcgctcacctcggccagcggcctggccatctacggcctgtcgaccgactcgcccaaggccaacacgaccttcaagaccaagcagaagctgccgtacccgctgctgtgcgacccgcaggcgtcgctgatcggcgccctcggcctcaagaagcagccccgcggcaccacccgcgccgtcttcgtcgtcgacaaggccggcaagatgctcgccctccagccgggcgggccggaggccaccgtcgccgtcgtcaagaagctcgtcgaagagctgccctcgggttcggcctctgctgctcctgccgagcaaaaagtcaaggcggaacaggtggcggagaagaaggaggagagagaggaggagaaggagaaggaggagaaggaggagaaggagaaggaagaggagaaggcgcagaagaaggaggaggaggagggcgccggggctgagaacaagtccgaggacgctcccaaggctgaaggtgagggccagggtgagagcaagagtgagggtgagaccaaggacaaggacgagactaaggccgagggcgaggccaaggctacggcgaatggggaggaaaagaagaaggagtag

SEQ ID NO: 5243 - protein, 313 aa, Myceliophthora thermophilia
MPMELRKRKEAPAPPPPVRRKMTKTAKTDTASKAKGDAEEKAAPVAASTNGSSSSGVPTVGDIINLDGFGGEIETNDGTKTTLKSLVDASKAGVVIFTYPKASTPGCTRQACLFRDSHEALTSASGLAIYGLSTDSPKANTTFKTKQKLPYPLLCDPQASLIGALGLKKQPRGTTRAVFVVDKAGKMLALQPGGPEATVAVVKKLVEELPSGSASAAPAEQKVKAEQVAEKKEEREEEKEKEEKEEKEKEEEKAQKKEEEEGAGAENKSEDAPKAEGEGQGESKSEGETKDKDETKAEGEAKATANGEEKKKE

SEQ ID NO: 5244 - DNA, 513 bp, Myceliophthora thermophilia
atgaacgcgacgcttccagacgctcctcttgccatgcagaagctcgacagcgtgatgcgagagtcggctcgcctcaactcattcgtcacggtcggcctgagtcgtgtggtggtggccaaggacggcgtcgtcacgcctgcgggcgtcaagatcccccgcggcgccgccgtcagcgtcccgagctacccggtctcccgggacaacgatatctacccgggcgctgacgagtttaggccgttccgcttcgccgagcagcgcgccgacgacagcgtcgagtacgtcaagcaggtcgccaaggccttcgcaaccaccagcaccgactacccggccttcggccacagccggaatgcctgtccgggccgcttcttcgccgccaacgacctcaagcttattctggcacacctcgtgctcaactatgacattaggccccgcaattcatggctcggcctgaacagggtgccgccgctccaggccacgatccgtatctgcggccgggtttgggcgcccttatag

SEQ ID NO: 5245 - protein, 170 aa, Myceliophthora thermophilia
MNATLPDAPLAMQKLDSVMRESARLNSFVTVGLSRVVVAKDGVVTPAGVKIPRGAAVSVPSYPVSRDNDIYPGADEFRPFRFAEQRADDSVEYVKQVAKAFATTSTDYPAFGHSRNACPGRFFAANDLKLILAHLVLNYDIRPRNSWLGLNRVPPLQATIRICGRVWAPL

SEQ ID NO: 5246 - DNA, 1455 bp, Myceliophthora thermophilia
atgccttcccccttggtttcggcggctatcaaacatgtcaaacaacaatctgtacggtcaaccgggataatactacggcccacgcagatgctgcatctcagaagctccagaaaccagctcgaacggacgcatgctcggaaggcagagaatcgccgtctcagtcgtcctcgcctccgccgccggcgcatttgctccgtttctgctcttcccgaaaatgcttcgattggattcacaaccggactcacgaccggacaagcccgtggcatccgagtctccggggtcctcaaaaaaattggtaagcaggggagcgaccgacaaagcacgaagcagacatggttactcacgcaggatcatgtctcccatcaggtgtttatctcgccttcgcccgcacttgaaggacatgaaacaggttccgacctggacttctacgaaacgctcgaccaagactacagcgaagccatagcgcacctcccagtggaggaagccatcctcacgacagcaccccacgtcccgccccccatcactcgggactaccccgtcctcctccgggtgtccctcacggcgtacaccaagctgatccagcttaccaaccggtaccaatacgagcagtggacgttcaacggcaccgtcccggcgccattcatccgcgcccgggtcggcgacgttgtcgacctgactctcaccaaccgcgacgcgaccggcaacccgcacaatatcgactgccacgccttcacggggcccgggggcggctccgcgctcaccaccgccgaggagggggagactaaggcggcccgcttccggcttctccgcccgggcatctatctctaccattgcgccgccgcgcccgtgcccgtgcacatcgccaacggcatgtacgggctcatgtacgtgcagccggcggtcccggggggcggagaggggctcccgcacgccgaccgcgagtactacgtcatgcagagcgagttctaccacgagccgcccgaggtgggcgacgacgggaggccctcccggacggtcgagttctcgtacccgaacgggctggccgaggagcccgcggtcgtcgtgttcaacgggcgcgagtcggcggcgacgcgggacgcggcgctgcgcgcccggaccggcgagaacgtccgcctcttcttcggcaacgccggccccaacctgaccagctcgctccacgtcatcggcagctgctaccggcgcgcctaccgcgacggcgacgtgctcggcccgcccgcccgcttcgtctccaccgtcagcgtgccccccggcggggcgaccatcctcgacatgaagatggtggtccccggcacctatacgctcgtggaccacgccatcttccgcctcgacaagggcgccgtcggcttcctaaacgtgtctgggaagccgaggccggacatctacgggagccaagagccgcctgcgccgtgtgttgggtgcaagctacacagctag

SEQ ID NO: 5247 - protein, 484 aa, Myceliophthora thermophilia
MPSPLVSAAIKHVKQQSVRSTGIILRPTQMLHLRSSRNQLERTHARKAENRRLSRPRLRRRRICSVSALPENASIGFTTGLTTGQARGIRVSGVLKKIGKQGSDRQSTKQTWLLTQDHVSHQVFISPSPALEGHETGSDLDFYETLDQDYSEAIAHLPVEEAILTTAPHVPPPITRDYPVLLRVSLTAYTKLIQLTNRYQYEQWTFNGTVPAPFIRARVGDVVDLTLTNRDATGNPHNIDCHAFTGPGGGSALTTAEEGETKAARFRLLRPGIYLYHCAAAPVPVHIANGMYGLMYVQPAVPGGGEGLPHADREYYVMQSEFYHEPPEVGDDGRPSRTVEFSYPNGLAEEPAVVVFNGRESAATRDAALRARTGENVRLFFGNAGPNLTSSLHVIGSCYRRAYRDGDVLGPPARFVSTVSVPPGGATILDMKMVVPGTYTLVDHAIFRLDKGAVGFLNVSGKPRPDIYGSQEPPAPCVGCKLHS

SEQ ID NO: 5248 - DNA, 2283 bp, Myceliophthora thermophilia
atgatcacgccgactccaaacccattcaccggccgtgctctccgagattttggtcgacgccatttcgccgggcaagcaatatgtcggcctgtcagggtccagcctcgtaacctacacattagcgttcctcgagcgtcaaagaacggcacgggccaaacaccgcatcccgagctcccgacggcacgtaggctgcctttccaggcccgagcagctccgttgagcgttctccttggcggcggtctagttgcctccttcctggcctactctcagtttggcgaagaaagccgggcgctacagggcgcggcgcccgcctcgaccgacgaccgcgatccctccttgcctcgattccgcctcgccgacgtccggaagcacgatggctcctcgtccgaaccgtgggtcatatttgaagacaaggtctacgatatcacggattgggtcccggcacaccctggcggcgacgtcatcctccgggcggctgggtcaagcattgagccgtactggaacatcttcaccatccacaagcgccgcacgtgcgcgagatcctgcagcagtacctcatcgggttcatcgatgtggccgacttgggccaggacgggcggccctgcagccgaggccatcgaagacccgtttgtgaacgacccggtacgcgacccgcgcctcatcacgcacacggagaagccgcgcaacgcggaaccgccgaacgaagagctcgaccgcgcgttccacacgccaaacgagttattctacatccgtcaccacatgtgggtgccgacagtagacgcggagaaggcagatgagcacgtcttgagcatcgagctcccggacggcgagaccaagaagtatacgctgggggatctgaagaaaaagttcccgacacacaaggtcacggctgtcctgcaatgcagcggcaacaggcggaacgacatgaccaggcatgctggcaagaccaacggactgcagtggggcgtaggtgccatcagcaacgccgagtgggagggagtccggctctcggatgttctggccgatgccgggctcaaagtgcgtgatgcgacttcgccgacgcgaaagggcacatccgctgctagcggcgacaacgagcttgacgccaacacgctccacgtccagttcaccggcctcgaggcatacggcgcctcaattcccctcaacaaggccctcgacccgcgcggagatgtgctcttggcttttggcatgaacggcgagacactgccgcgagatcatggtttccccctgcgggctgttgttccaggccatgtcgcagctcgttcggtgaagtggctcagcaagattatcgtctccgatgaggagagccacagccaatggcagcgccgcgactacaagtcatttggcccgaacgaaggcccgaatcctgactgggaccgcgcggtttccatccaggaaatgcccgtcaccagcgctatcactggcgtctgggtaggcgactgcgtgcggaagggccgcgttccctggatgaacccgagcaggatcccacaacctgccaaaagtagtagcagccccatcctcgacatggccgcggtgtccaagcgagtaggctttacgcctgagccaacctcgtccgacaccaccaccaccaccaccaccaccaacaacaacaacaacaacgagaagaacctctccccatccccctgcccaccaaccaccccggccgacgaacccatcgcgatgcaaggctacgcctactcgggcggcggccgcgccatcacccgcgtcgacgtctccctagacggcggcaagacctgggaccaagcggagctggtcaacgactgcgccgacccggcctctccctgcttcggcaacaagtcctggacctggacccgctggcgctacgtcggcgccctgcccgtcctcagcctccccaccgaagaagggccggcgccggcagcgggaggaggggcggaggagacgggagccgggggatgccacggcggcgaccgcaagacaagccggaagcactgcaccaccctcgtcgtcaaggccaccgacgacgcctacaacacgcagcccgagagccaccgcggcatctacaacgtgcgggggaacctggccacggcgtggcatcgcgtcaagatctgtccgcgctgtacggggccgtcggaggatgggacctccgacggcaggggcctgacgtggtcgaccggggagacgtacggttgcgggttcaagaaggaggctgaggaggtgagggagggaatgaggcgacagggtgttgttgggaacggcaacgggagcgaggagaagaagtga

SEQ ID NO: 5249 - protein, 760 aa, Myceliophthora thermophilia
MITPTPNPFTGRALRDFGRRHFAGQAICRPVRVQPRNLHISVPRASKNGTGQTPHPELPTARRLPFQARAAPLSVLLGGGLVASFLAYSQFGEESRALQGAAPASTDDRDPSLPRFRLADVRKHDGSSSEPWVIFEDKVYDITDWVPAHPGGDVILRAAGSSIEPYWNIFTIHKRRTCARSCSSTSSGSSMWPTWARTGGPAAEAIEDPFVNDPVRDPRLITHTEKPRNAEPPNEELDRAFHTPNELFYIRHHMWVPTVDAEKADEHVLSIELPDGETKKYTLGDLKKKFPTHKVTAVLQCSGNRRNDMTRHAGKTNGLQWGVGAISNAEWEGVRLSDVLADAGLKVRDATSPTRKGTSAASGDNELDANTLHVQFTGLEAYGASIPLNKALDPRGDVLLAFGMNGETLPRDHGFPLRAVVPGHVAARSVKWLSKIIVSDEESHSQWQRRDYKSFGPNEGPNPDWDRAVSIQEMPVTSAITGVWVGDCVRKGRVPWMNPSRIPQPAKSSSSPILDMAAVSKRVGFTPEPTSSDTTTTTTTTNNNNNNEKNLSPSPCPPTTPADEPIAMQGYAYSGGGRAITRVDVSLDGGKTWDQAELVNDCADPASPCFGNKSWTWTRWRYVGALPVLSLPTEEGPAPAAGGGAEETGAGGCHGGDRKTSRKHCTTLVVKATDDAYNTQPESHRGIYNVRGNLATAWHRVKICPRCTGPSEDGTSDGRGLTWSTGETYGCGFKKEAEEVREGMRRQGVVGNGNGSEEKK

SEQ ID NO: 5250 - DNA, 2514 bp, Myceliophthora thermophilia
atgctgaaccgggctaacccgtatcctaggaagaaggtggcggttgttggcggtggctgcgctgggatcgcggccttgtgggcgttgaaccgtagtcctcatgatgtctacctgtacgaggccaatggccgccttggcgggcatactcagacggtggagttcaccaagggcaagtacaagaccctggttgacacgggtttcatcgtcatgaacaccgagacatacccgaactttctcagttttctcaagaggatcggtgtggagacggaaccgacggagatgagcttctctgtgtcccgagatcacggatggttcgagtgggccggcaccagcttgagtaccgtgttctgccagaggggtaacctgctctcaccgagcatgtggcgcatgctgttcgacgtggtccgcttcaacaatttcgccctggatcttctgagggcggacgactcgaccgatgagaccattggggagtacctcgaacgccaagggtattcgaaagccttccgcgacaactacctcatccccatggcggctgctgtgtggagcacaagcccggacaagtgcgcgctcgactttccggcggcgacactggttcgttttctgtggaaccatcatctgctctcaacggtcgccgcgcggccacagtggctcaccatcagcacggggtccaagacatacatcgacaaggtcatgaagggcttcccgtccaaccacttgcggctcaacacgaccgtgacatcggtgaccaacgatgctgatggacgcgtacggctgcacacggagggcggaaaatctgaggtgtttgaccacgtcatcctggcgacgcacggcgaccaagcgtactctatcattctcgactcggcgaccgaggaggagaagtcgattctgtgcaacttccgtacgtcacagaacgaggccgtgttgcattcggacacgtctttgatgcccaggtctcgggctgcctggtcgagctggaactatctatccagatcgacgtggctaaagggcgaaagcaacacggaccaagtatgcataacgtacaacatgaacatcctacagcacatccctcgcgacgctttcggcgacgtcctggtcacgctcaacccgttgcacgaaccggatccgaagacggtccaagggcggtacagctaccgacacccgctgtacactccggctgccgtccgggcacagcagcggctcgactcgattcagaacaggcgcggtatcagttacgcgggagcatggacgaagtatgggttccacgaagacggcttcagcagcggactgcgcgtggcggtggagcacctcggcgccaccattccgttcgagttcaaggactcgacgtgtagccgcggtgaaaggccgaagctgacgctcttggaccacatcgtgagactgttgatttcgctggtgcaaatgttttttctcgacatactggatgggctggtgcatgtggtgaacaggtcaacaacgcggcggctggcgttgaggggccccactaagcagccggcagcacccgctcgccaagaagcttcgcgttcccctcccgctgccgttcgcgggtcggatgatccattcccgaccagaccgaacacgagcctccggcaacccgcaacctccgataccatgagctcaataccgcgctttgcgcagcgcgtagccgctgaagcgtcctccagctggcactgcctcttctgccggcgcgccggcgctcaatggcagcagccggctgctgcttcgaactctgcgagagcgacaacaacaagcaggtcgtggtcgtcgtccggatccaagcggctcttctcggagagcttccctaggcggcaacagcagcaacaacaacaacaacagcaacagcatggggcaaaaccgggggggacggcgccggggatggacgagatgagcgaggagtacaagaggcggaaccgatcgactgcgtattacacgatcagcatcatcctggggacggtcgctctctcctatggctcggtgcccatgtacaagatgatctgccaaacaaccggttggggtggccagccggtccgcgcgcacggtaccgccacctcggagacgtcgcccgaagagctggcctcgcgcctcgagcccgtcaaggacgcgcggcgcatccgcgtgaccttctcgtcgtccgtgtcggacgtgctgccctggaagttcacgccgcagcagcgcgaggtgcgcgtcctgcccggcgagaccgcgctcgccttctacacggccaccaacctgtccgacaaggacatcgtcggcgtcgccacctactcggtcacgcccgcccagacggccccctacttcagcaagatccagtgcttctgcttcgaggagcagcgcctcgccgccggcgagaccgtcgacatgcccgtcttcttctacctcgacccggacctgctcaaggacgtcaacatgcgcaacgtccacaccgtcacgctcaactacaccttctttaaggcgaggtatgacgagaacggccggttccaggggccgccgggattctga

SEQ ID NO: 5251 - protein, 837 aa, Myceliophthora thermophilia
MLNRANPYPRKKVAVVGGGCAGIAALWALNRSPHDVYLYEANGRLGGHTQTVEFTKGKYKTLVDTGFIVMNTETYPNFLSFLKRIGVETEPTEMSFSVSRDHGWFEWAGTSLSTVFCQRGNLLSPSMWRMLFDVVRFNNFALDLLRADDSTDETIGEYLERQGYSKAFRDNYLIPMAAAVWSTSPDKCALDFPAATLVRFLWNHHLLSTVAARPQWLTISTGSKTYIDKVMKGFPSNHLRLNTTVTSVTNDADGRVRLHTEGGKSEVFDHVILATHGDQAYSIILDSATEEEKSILCNFRTSQNEAVLHSDTSLMPRSRAAWSSWNYLSRSTWLKGESNTDQVCITYNMNILQHIPRDAFGDVLVTLNPLHEPDPKTVQGRYSYRHPLYTPAAVRAQQRLDSIQNRRGISYAGAWTKYGFHEDGFSSGLRVAVEHLGATIPFEFKDSTCSRGERPKLTLLDHIVRLLISLVQMFFLDILDGLVHVVNRSTTRRLALRGPTKQPAAPARQEASRSPPAAVRGSDDPFPTRPNTSLRQPATSDTMSSIPRFAQRVAAEASSSWHCLFCRRAGAQWQQPAAASNSARATTTSRSWSSSGSKRLFSESFPRRQQQQQQQQQQQHGAKPGGTAPGMDEMSEEYKRRNRSTAYYTISIILGTVALSYGSVPMYKMICQTTGWGGQPVRAHGTATSETSPEELASRLEPVKDARRIRVTFSSSVSDVLPWKFTPQQREVRVLPGETALAFYTATNLSDKDIVGVATYSVTPAQTAPYFSKIQCFCFEEQRLAAGETVDMPVFFYLDPDLLKDVNMRNVHTVTLNYTFFKARYDENGRFQGPPGF

SEQ ID NO: 5252 - DNA, 2847 bp, Myceliophthora thermophilia
atggcttcaccgggccagccggcgctagggagcgccgcggatgcttcatcgcaggctcttgcggggcttgtgaaacgaatcgacattccctattcaccgaacagccctcccggcctagtacaggcgctcacgctggatccgtggacgaagtctggaaagtacgggctgggatggacctactttgcgattgcggtcggaggcttgacggtggtggtgaggatatggcactactggcaggacaagatccggcaggccatatacaagcaggagatggagcagcactttcagaaactgtactccctggacccgggctgggaccggacggcggctctggcgacggccgtgacgacggccgatacgacggccgagtcggggaggcacttcttcccggaggagccgccgatggagaacaagaacttcaggcccaaggcgcatttctcgtccgtcggctttgtcaacgacaccctcgccctcttcagatgggtcttttaccgcccgatcccggacatcgtgtggaggaaacaccggttcaccttcagctccctcgccgtgttgggttgcgtcttcatcgctctcgcgttcgtgaccgtcttcagcttcttgcagcagcctctgtactggcagagcatccggttcgggtctcccccgctcgccatccgctccggcatgatcgccgtcgccatgactccctggatcttcgcgacgagcaccaaggcgaacatcctcaccatcatcacggggatcggacccgagcgcctcaacgtcttccaccgctggctggggtacctctgtctcttcatgtcgctgatccacatgatcccgttctacatccagcccgtctgggaggacggcgggatgcaggtgttccagaagctcttcccccccgggagcggcatcatctacggttccggaatcgcctgcctcgttccgctctgctggttgtgcgtcgcctcgctgcccgtcatccgccggactgcgtacgagctcttctcgctcctacacgcccccatcggttacgtctacctcggcgtgctcttctggcacaccaagaactttctcatgtcctggggatacctgtacgcgtccgtcgccatcattgccctgtgcaacatcctgcgcctcctcaagctgaactgggcgagaccctggcgcatgtcctggctcatcggagacgaggccgccatcaacatcatgacggagaacgccatcaagatcacgatcccgacgcggatgcggtggaagccgggccagtacgtctatctgcggatgcccggtatttcgctcctcgagaaccaccccttcaccatctcctccctctgcagcgaggacttcccgtccgagtatggcgaggagtaccgcgactgcgtgctcgtcttccgcccctacggaggcttcacgcgcaaggtgctggagacggccatcgagaaggggcccttccacacgtaccgcgccttcctcgacggcccttacggcgggatgcgtcgcgagctggccgcgttcgacacgtgcatcctgatcgccgggggcagcggcatcacctcgctgatgtcgcagctcctcaacctgatcaagcgcatgcgggacgggaaggccatcaccaagaagatcgtggtggtgtgggcgctcaagcggctcgaggccatggactggttccgcgaggagctccgcatctgccgcgagtcggcgccgccggagagcgttacgtgcaagttcttcgtcaccgcggcggtcaggcagaagccgaaccacgcgatgcctcacggccgcgcgccccggccgctgagcaacatgttccacgacaagctggacggtttcgtcgcgggcatcgcgagcaagcgtaacagcgccctcatcatggccgaggcgcagggcgatccggagagggagcgcgagctccgccgcgaggacgaagaccgcatcacggcgctgccgcagcagaagtacctccaaccgcacaccttcccgcctccgcccccgggccctccgccgtcgaacgggaccgggttgtcgcccgccgaggaggcgctccgccgactcgaaggccgcgatggcgacgccaagggctccgagccgctctcctcggacggccactcggggggcgcgcagaagaagaagaacaagaagatggacggcgagttccacttcccgcctctcggcgccttgcgccccgaaggcatcccacacttcaactacgccccgccggcagggagacagcggtacagccagatcatcgcagaagccaaaccccgcctgagccaagtgctaagcgaagcatgcagcggtggcggtggtggtggtggtggtggcggcggcaatgagatgcccagcgacgtcaagagccatgactacaatgagcacgaccaaaaccccgagcaggctcaagccaacatgggcgagaccaccgagagcggcggcggcgacaagggcagcgcagagcccgtccgcgcgccggaactggcgcacctccgcacggacggggccggcttctcgcggccgcggccgacgagcacgttcggcccgccgtccgggttcgactttgggttccccgagacgccgaccgagttccagcggtcgctgatgcgcttcgccttcccggtcccgcacgagatcgacggcgggtggagcgtcgagtacggccgcccggacctcgggtacatgctgagggagtgggctacgggcgggccggacgggcgggggatcctgggccggcgcacggccgtgttcgtgtgcggcccgccctcgatgcgcgtcggcgtcgccaacacggtggccgccctccaggccgagatctggggcgacgacatgctcgaggagatctttttgcacaccgagaactatgctctatga

SEQ ID NO: 5253 - protein, 948 aa, Myceliophthora thermophilia
MASPGQPALGSAADASSQALAGLVKRIDIPYSPNSPPGLVQALTLDPWTKSGKYGLGWTYFAIAVGGLTVVVRIWHYWQDKIRQAIYKQEMEQHFQKLYSLDPGWDRTAALATAVTTADTTAESGRHFFPEEPPMENKNFRPKAHFSSVGFVNDTLALFRWVFYRPIPDIVWRKHRFTFSSLAVLGCVFIALAFVTVFSFLQQPLYWQSIRFGSPPLAIRSGMIAVAMTPWIFATSTKANILTIITGIGPERLNVFHRWLGYLCLFMSLIHMIPFYIQPVWEDGGMQVFQKLFPPGSGIIYGSGIACLVPLCWLCVASLPVIRRTAYELFSLLHAPIGYVYLGVLFWHTKNFLMSWGYLYASVAIIALCNILRLLKLNWARPWRMSWLIGDEAAINIMTENAIKITIPTRMRWKPGQYVYLRMPGISLLENHPFTISSLCSEDFPSEYGEEYRDCVLVFRPYGGFTRKVLETAIEKGPFHTYRAFLDGPYGGMRRELAAFDTCILIAGGSGITSLMSQLLNLIKRMRDGKAITKKIVVVWALKRLEAMDWFREELRICRESAPPESVTCKFFVTAAVRQKPNHAMPHGRAPRPLSNMFHDKLDGFVAGIASKRNSALIMAEAQGDPERERELRREDEDRITALPQQKYLQPHTFPPPPPGPPPSNGTGLSPAEEALRRLEGRDGDAKGSEPLSSDGHSGGAQKKKNKKMDGEFHFPPLGALRPEGIPHFNYAPPAGRQRYSQIIAEAKPRLSQVLSEACSGGGGGGGGGGGNEMPSDVKSHDYNEHDQNPEQAQANMGETTESGGGDKGSAEPVRAPELAHLRTDGAGFSRPRPTSTFGPPSGFDFGFPETPTEFQRSLMRFAFPVPHEIDGGWSVEYGRPDLGYMLREWATGGPDGRGILGRRTAVFVCGPPSMRVGVANTVAALQAEIWGDDMLEEIFLHTENYAL

SEQ ID NO: 5254 - DNA, 366 bp, Myceliophthora thermophilia
atgccaagcttttgggctcttcgcgcaaacactcaggaacagctcaccatttcgcacacgacccctagtcccagctcccaaccccaggtcaattgggatcctaagcaccgtcaaaatggccagcgcgatctacaagcaagtctccctccgataaaccgccgcagcccaccgcgatcgaagctaacactcgtcgtcagcgctctcttccggaggaacttcaccatgctcggcgtcgtcttcgccggtgccttcgcctttcagcttggctacgacggcctgatgaacaagatctgggacaaccacaaccgtgggcggcaatggaaggacatccggcacaagtacatcgagggtggggatgacgagtaa

SEQ ID NO: 5255 - protein, 121 aa, Myceliophthora thermophilia
MPSFWALRANTQEQLTISHTTPSPSSQPQVNWDPKHRQNGQRDLQASLPPINRRSPPRSKLTLVVSALFRRNFTMLGVVFAGAFAFQLGYDGLMNKIWDNHNRGRQWKDIRHKYIEGGDDE

SEQ ID NO: 5256 - DNA, 399 bp, Myceliophthora thermophilia
atgacgagcatgcgtcccgacgggcacgtgctgtggtcgaccgacgtggccgtgcccgtgtcgcggctggccgacacggtcgactggtccaaggccgagtgcagccggctgggcctcttcgccagcgtcgtcggccacgtcggcgacggcaacttccacgtcgccatgatctacgacccgcgcgacccggcccaggccgccgccgtggcccgctgcgtccgccgcatgacggaccgggcgctcgagatggacggcaccgtgagcggggagcacgccatcggcatcggcaagaaggcctgtccccgggacgagctcggtgacgagacaatcgggctcatgagggccctgaagcgggcgctcgaccctaaaatggatcatgaacccgggcaaggtgtttga

SEQ ID NO: 5257 - protein, 132 aa, Myceliophthora thermophilia
MTSMRPDGHVLWSTDVAVPVSRLADTVDWSKAECSRLGLFASVVGHVGDGNFHVAMIYDPRDPAQAAAVARCVRRMTDRALEMDGTVSGEHAIGIGKKACPRDELGDETIGLMRALKRALDPKMDHEPGQGV

SEQ ID NO: 5258 - DNA, 1833 bp, Myceliophthora thermophilia
atggcgtccgtggacctagaccagccgtttgactacattgtggtcggcggcggcactgccggcctcgttgtcgccaaccgtctctctgaggacagcaatgtccgcgttctcgtcgtcgaagccggcgccgaccgcaacgccgatcccttggtcctgacaccaggccttgtggccggcctctacggaaaggacgagtatgactggaacttcagctcgcccccgcagccaaccctgaacaaccgacgtatcaaccaggctcggggcaagatgctcggtgggacctccggtctcaacttcatgatgctgctctacccatccaagggcaacatcgactcttgggccgccctgggcaatccgagctggaactatgacgcgctggccccctacctgcgcaagtttgccactgtccacccgtcgcctcagtccgcccgagacttgcttggcctgacctacatcgacgagagcttggcggcgggcgacggtcctattcaggtttcgcacacggatgggcacaatgtgacgaacaaggcttggctggagacatttgctagccttggcctcgaggtctcgaccgatccccgcgacgggaaggcgctgggagccttccagaaccacgcctccatcgatccagctacgcacacgaggagctttgccggccccgcgtactacacccccgacgtggccaagcggccaaatctcgtcgtgctcaccgagaccttggtcgcccgggtcctctttgacacggccggcggcgagggggacgcggtcgcgactggtgtcgagatcatcaccaaggatggccagaagaagcaggtctcggcctgcggcgaagtcatcctggccgcgggtgcgctccagagcccgcagattctcgagctctcgggcgtcggcggccgcgagctgctcgagaagcacaacatccccgtcgtcgtagataatcccaacgtgggcgagcacgtgcaggatcaccccatcgtctgccagagcttcgaggtcgccgacggcgtgccctcgggcgacgtcctgcgcgatcccaacgtcctccaggccgtcgtaggcatgtaccagtcgggcggcggcgccgggccgctgggccagagcgtcatcagcgtcgcttacaccccgctcgtcgacggctctggcgtcgtctcggccgaggccaaggccgaactgctcgcccggcacgagtcgagcttttccacggccgaaggcaaggtccttcgcgacctggtcgaatccccctccgaagccaccttcgaattcctcctcttccccagccaggtggacatccccgagaatccgaccagcatggcgcagtacatcacacccgtgctccccgagaattacatcagcgtcatgaccttcatccaccagcccttctcccgcggcaaggtccacatcaccagcccggacatcagggcggcgccgctctgggacccgcggtacaactcggacccgctcgacctggagctgctggcgcgcggcgtgcagttcgtcgagcgcatcgtcgactcggccaccccgttcggccgggtcctgaagcagggcggcaagcgccagccgccgctgcgggccgacgacctcgagaccgcgcgcgagattgtgcgccagcgccagatctcggtcttccacgtctcgggcagctgcacgatgcgcccgcgcgaccagggcggcgtggtcgacgagcgcctgcgcgtgtacggcacccgggggctgcgggtcgtcgacgctagcgtgttccccatcgagccggtaggcaatatccagagcgtcgtgtatgccgttgcggagcgagctgcggatctgatcaaggaggaccgcgcgaaggcgtag

SEQ ID NO: 5259 - protein, 610 aa, Myceliophthora thermophilia
MASVDLDQPFDYIVVGGGTAGLVVANRLSEDSNVRVLVVEAGADRNADPLVLTPGLVAGLYGKDEYDWNFSSPPQPTLNNRRINQARGKMLGGTSGLNFMMLLYPSKGNIDSWAALGNPSWNYDALAPYLRKFATVHPSPQSARDLLGLTYIDESLAAGDGPIQVSHTDGHNVTNKAWLETFASLGLEVSTDPRDGKALGAFQNHASIDPATHTRSFAGPAYYTPDVAKRPNLVVLTETLVARVLFDTAGGEGDAVATGVEIITKDGQKKQVSACGEVILAAGALQSPQILELSGVGGRELLEKHNIPVVVDNPNVGEHVQDHPIVCQSFEVADGVPSGDVLRDPNVLQAVVGMYQSGGGAGPLGQSVISVAYTPLVDGSGVVSAEAKAELLARHESSFSTAEGKVLRDLVESPSEATFEFLLFPSQVDIPENPTSMAQYITPVLPENYISVMTFIHQPFSRGKVHITSPDIRAAPLWDPRYNSDPLDLELLARGVQFVERIVDSATPFGRVLKQGGKRQPPLRADDLETAREIVRQRQISVFHVSGSCTMRPRDQGGVVDERLRVYGTRGLRVVDASVFPIEPVGNIQSVVYAVAERAADLIKEDRAKA

SEQ ID NO: 5260 - DNA, 828 bp, Myceliophthora thermophilia
atgaccttcaacggcaccgtctccaggccgaccatcatcgccgactggggcgacgatgtcaccatccatgtgaccaacaacatggcgtccaacggcacgagcatccactggcacgtggccaggctgggcgcagcgcccgtcatgcagaacggcctgatcaacggcaccaactcgtacaactgcaccggcgagagcgacgtcagatggtctgagcgcaacaagaagtacctgttccggctcatcaacgttgccgtcgacggcgtgttcgagttcagcatcgacgggcacggcctgcaggtagtggaccacgatctcgtgcccatcgtgccctacaagaccgacagcgtccagctgaccatcgggcagcggtacgacgtgatcagcgaggccaacgcggagccgggaagctactggctgcggtccggctggaacacagactgtgcccggaacgggaacgcggccgacatcatgggcatcgtgcgctacgactccagcagcaccgccgaccgagtcggagagcaccgtcacactgtcggattcttgcctcgacgagccgccggccaagaccgtgccccatctctcactggacgcgtggtgtacgagaacatgaactccacgctcgccatcgccttccgcctggacagcccgggcgcctggctcgtccactgccacatcgtctggcacgccagccaggccctggcgctcgagttcgtcgagagccagtcgcgcatcccgccagacgaccgcagtacctggatgtaccgcaagacgtgcgactcctgggtggcctggacgcccatctgggaccaggaggaatctgggatatga

SEQ ID NO: 5261 - protein, 275 aa, Myceliophthora thermophilia
MTFNGTVSRPTIIADWGDDVTIHVTNNMASNGTSIHWHVARLGAAPVMQNGLINGTNSYNCTGESDVRWSERNKKYLFRLINVAVDGVFEFSIDGHGLQVVDHDLVPIVPYKTDSVQLTIGQRYDVISEANAEPGSYWLRSGWNTDCARNGNAADIMGIVRYDSSSTADRVGEHRHTVGFLPRRAAGQDRAPSLTGRVVYENMNSTLAIAFRLDSPGAWLVHCHIVWHASQALALEFVESQSRIPPDDRSTWMYRKTCDSWVAWTPIWDQEESGI

SEQ ID NO: 5262 - DNA, 1419 bp, Myceliophthora thermophilia
atgatccatccatcgagtcaacaaaaccggctctcggcggagcacgtcgaggtactatgtagcgccatctcgagcgagacgggacgcaaattcgatgtcaccgacatcgaagtccccttcgccgacctgtgtctggaccccttcgcggtgatgaacgtgctcgagacagtaagggagcgcaccgggatcgaactccccgcctcgctctttcgagactgcagcagcgttgctgagattgccaacaagcttggagctactaccatcagcgcaccatctggctcgtcgatctctccccacggtggactggtccaggcggcatttgcagatatcggcaagctgcttgggaaagtcgaggacgaagctggaaccagcaatttctggtcagatgtgcacccggctcaaatgagactcgtccttgcctacgtcaatgagtccttcgcccggctgggatctccgctaagcggcatggcgcccaataccccgctgtcgatcccgcccggcgtcttgcccaagcaccaccgggtgctgcgcggggccatctttgacattctcaagatcggcgggctagtggagcgccgaggcgatcgctacgtccgcacgagcaccccggtcgacacgaccccggccgaggtgatctacgagaagctgattcgggagcacccgttgcacgccaacacgcaccgcctcctccacgtcaccggctcgcggttcgcagaatgcctctcgggcgaggccgaccccctcaagctcctgttcggcaagagcaaggacctgctgcaggacttctacacaaacgcccccatgtccgtcgtcgcctccgagctgcttgccgcccttctcaggaccgtcttctccaagatatcccgtgagcagaaccgcgcagtcgagatactcgaggtcggcgccggcctgggtggcacaacccagttcgtcctcgacatgctcgtggaagccgggatccccttcagatacgtcttcaccgacatctcggcctctttcttgtctgctgccaaggccagatacaaagacctccacccgggtagcatcgagtatctggtcctcgacatcgagaaagaaccgcccggtcatcttcaagaccggtttgacgccgtcatatcgaccaactgcatccacgccaccaaagatcttatcgtctcctgtaccaacgcgcggcgcctggtccgtcccggtggcttctttgccttggtcgagttcaccactcggctctattggctagaccttgtcttcggcctgctggacggatggtggctctttactgacgataggacccattgcacaacgaatgaggccgtgtggaaggcgaagctggccgcatccggattctctgacgttctgtgggtggagggcgaagggggccgaaaacccaacccccagctcataatcggttgtacggaataa

SEQ ID NO: 5263 - protein, 472 aa, Myceliophthora thermophilia
MIHPSSQQNRLSAEHVEVLCSAISSETGRKFDVTDIEVPFADLCLDPFAVMNVLETVRERTGIELPASLFRDCSSVAEIANKLGATTISAPSGSSISPHGGLVQAAFADIGKLLGKVEDEAGTSNFWSDVHPAQMRLVLAYVNESFARLGSPLSGMAPNTPLSIPPGVLPKHHRVLRGAIFDILKIGGLVERRGDRYVRTSTPVDTTPAEVIYEKLIREHPLHANTHRLLHVTGSRFAECLSGEADPLKLLFGKSKDLLQDFYTNAPMSVVASELLAALLRTVFSKISREQNRAVEILEVGAGLGGTTQFVLDMLVEAGIPFRYVFTDISASFLSAAKARYKDLHPGSIEYLVLDIEKEPPGHLQDRFDAVISTNCIHATKDLIVSCTNARRLVRPGGFFALVEFTTRLYWLDLVFGLLDGWWLFTDDRTHCTTNEAVWKAKLAASGFSDVLWVEGEGGRKPNPQLIIGCTE

SEQ ID NO: 5264 - DNA, 984 bp, Artificial Sequence
  Synthetic polynucleotide
  misc_feature (621)..(621): n is a, c, g, or t
atggaagaaggaaggctccattctctgacgttccgcgaccggctggcgacagagtaccgctggacggtcgccccgctcatcgtgggcgcgccgatgcgggtcatgtcgggtcccgagctggccgtggccgtgtcccgcgccggcgggctcggctttatcgggccgggcctgaaaccggagagcacggcggccgacctggagacggccaaggggctgctgctcgcctcttcttcttcttcttcttcttcttcttcttctcctcctcctcctgcttctgattcctctgattctttctcctacggcatcccgcagcgcgacggcgtgctccctgtaggagtcgggttccagctctggaacggcgacgttgacgtggccgcggcggcggtcgcgcggtaccgcccggcggcggcgtggctctttgcgccgcggcacggccagcccgacgtggacgcgtggacgcggcggctgcgcgaggcgtcgcccgagacccgcgtctggctgcaggtcggcacgctgcgggaggcgctcgacgcggcgcggagcgcgtccccgccggacgtcctggtcgtccagggcgccgaggcgggcgggcacggccgggcgtcgggcggcaccgggggngggcgcaagggctaccaggacgaggtggtccgggcggccgacggcggcgccaacacggtccggacgcacctgtacaaccacctccggggcacgttcggctggccggagcagttcagcccgcgcaccatcatcaaaccggagctgggcctgagcatcaggccggcaccccgttccaagagatcaagaaacgaccacgacgaggccgtcagtaagggagatgccgcgtgggggcccgacgggtggaccgcgacctacgccggtgccaatatcggcttgatcaggagcgtagccgccgccggcgacatcgtacgagaggtcagaagtgaagcggtgaggatcattcagacattgagcggcctgtaa

SEQ ID NO: 5265 - protein, 327 aa, Artificial Sequence
  Synthetic polypeptide
  misc_feature (207)..(207): Xaa can be any naturally occurring amino acid
MEEGRLHSLTFRDRLATEYRWTVAPLIVGAPMRVMSGPELAVAVSRAGGLGFIGPGLKPESTAADLETAKGLLLASSSSSSSSSSSPPPPASDSSDSFSYGIPQRDGVLPVGVGFQLWNGDVDVAAAAVARYRPAAAWLFAPRHGQPDVDAWTRRLREASPETRVWLQVGTLREALDAARSASPPDVLVVQGAEAGGHGRASGGTGXGRKGYQDEVVRAADGGANTVRTHLYNHLRGTFGWPEQFSPRTIIKPELGLSIRPAPRSKRSRNDHDEAVSKGDAAWGPDGWTATYAGANIGLIRSVAAAGDIVREVRSEAVRIIQTLSGL

SEQ ID NO: 5266 - DNA, 1695 bp, Myceliophthora thermophilia
atggcttccgaatatgatttcgtggtggttggaagcggacctgcgggctgtgcgctcgcgtacggtttggttcactcggctaaaaagcccaaggttctcctgctcgaggccggtggcaaaaatggagatcccaacctccgcgtcgacgggcagcgttggttgaccttcaccaacaaagacgtcaactggggctacaagacgacaccccagactcactgcgccgggcgcgagctcgactactctaggggtctcggtctcggcggatctagcgccatcaactttggcgtcttcaccgtcggcgcccgcgacgactacgatgagtgggcacgcatcgtcggcgacgacgccttccgctgggagcacgcccaggcacggctgaagcgcctggagaacttccagtccaaccccccggcgggcgtcagcagcaagtacgcggcacccaagccctcggaccatggctcggccggccctctccgcgtcggctacgcggccgagtgtgaggccgacctcgtcccgctgctcgacgccttcgagcgggccggctatcccctgaatcccgaccacaactccggcaacccgatcggtatgtccttgctgatcagctcggcgcacaagggcctccgctccacgtcgcacgacttgctggtaccatacccggagaacctcaccgtcgtgaccgaggcgcccgtgcagcgcgtcttgctggacggcaagagggccgtcggcgtggaggcgaacgggaagcggtacctggcttccaaggaggtcatcatgaccgccggctcgctcgacaccccgcggatcctcatgcactccggcatcgggccgaaggagcagctcgagaagtacaacatccccgtcgtccatccttgcgccgctatcggccagggtctgcgagaccacgccttcgtcccgctcgtctatacccgcagggagggtagcacggaccgcgccagcttctacggcaaccaggcggccatggatgccgccctggaggagtggaagcagcaccgcacggggccttggaccaagttcgccaccgagatggccatcggctacttcaagtcggacgcgatcgcgtcctcggccgagttcaagtcgctccccgcggacgagcagcggtacctcaacgccgagacggtgccgcactacgaggtcttcacccacttccccatccactggttcctgccgggcttccggaacgaggacctcaactactcgtgcctcctcgtcttcctgtacaacgcccaggcgcgcgggaccgtgacgctgcagtcgtccgaccccgacgtgcccctgctcttcgaccccaacttcctcgcgcaccccttcgaccgccgcagcgccatcgaggccctccgcgaggtcctgcgcttcaccaggacggaggcctacgccaaggacatcgtctccaccatcgccgcgcccaagtccgactcggacgaggacctgctcgcctactgggagcagaccatcggatcgagctggcacatgaccggcaccgtcaagatgggcaagccgggcgacgccgacgccgtcgtggataacagcttccggcttatgggcatcgacggcctgcgcgttgccgatatgagcgtcgtccctgtgctggcgagctgccacgtgcaagctgttgcgtatatcaccggcgccacatgcgctgagaagctggtgaaggagtatggtctcgagtaa

SEQ ID NO: 5267 - protein, 564 aa, Myceliophthora thermophilia
MASEYDFVVVGSGPAGCALAYGLVHSAKKPKVLLLEAGGKNGDPNLRVDGQRWLTFTNKDVNWGYKTTPQTHCAGRELDYSRGLGLGGSSAINFGVFTVGARDDYDEWARIVGDDAFRWEHAQARLKRLENFQSNPPAGVSSKYAAPKPSDHGSAGPLRVGYAAECEADLVPLLDAFERAGYPLNPDHNSGNPIGMSLLISSAHKGLRSTSHDLLVPYPENLTVVTEAPVQRVLLDGKRAVGVEANGKRYLASKEVIMTAGSLDTPRILMHSGIGPKEQLEKYNIPVVHPCAAIGQGLRDHAFVPLVYTRREGSTDRASFYGNQAAMDAALEEWKQHRTGPWTKFATEMAIGYFKSDAIASSAEFKSLPADEQRYLNAETVPHYEVFTHFPIHWFLPGFRNEDLNYSCLLVFLYNAQARGTVTLQSSDPDVPLLFDPNFLAHPFDRRSAIEALREVLRFTRTEAYAKDIVSTIAAPKSDSDEDLLAYWEQTIGSSWHMTGTVKMGKPGDADAVVDNSFRLMGIDGLRVADMSVVPVLASCHVQAVAYITGATCAEKLVKEYGLE

SEQ ID NO: 5268 - DNA, 906 bp, Myceliophthora thermophilia
atgtttgacgagcaacccaacctcatccaagagtacgaattctcggaggaggatgactggccgtgggagaagcggagaagagcgccggtcccgctgttcctcatccacgacggcggcggcaccattttctcgtactactgcctccgcgagctcgaccgccccgtctacggcatcgctaaccccaacttcgactcgggcgccgcctgggccgggggcatccccgagatggcgcggcactaccgcgccttcatccgctcggccctcccctcgggcggggacgtcatcgtgggcgggtggtcgctcggcggcctcatctcgctcgagatcgcccaccagatcgccgaggaggcgaggcgttccccgccgggcgagccccgcctgagggtggtcgggatcgtcatggtggactcggtctgccccgtcatcgggaccgcgtcgtggcggccgatcgtggagcacaacattgtgtggagtgagaacacgcgggaggagaccaagcagaaggtgatgcgctgcttctcggaggcgctgaggatggtcagggagtggaagctgccggattgggagggggaagagggagtagagggggagaggggggaagagggcgacgacggggagagggcaccgccaccgctgcgacccccgcccgtcgtgctgcttcgcgccctcgaatgcgtcccagagcccggagaaggactgagcagggtggacgtctaccggtcggacccccagctcggttgggggctctacaggaaagatctgatcgccaaggtcatcgatattcccgggcaccatttcaacctcttccataccgaggagaacttggatgcaacgaccgaggcgatcaagaaggcttgtcgggaaatcgagatgagggccaactttggcagccatacttcggaatga

SEQ ID NO: 5269 - protein, 301 aa, Myceliophthora thermophilia
MFDEQPNLIQEYEFSEEDDWPWEKRRRAPVPLFLIHDGGGTIFSYYCLRELDRPVYGIANPNFDSGAAWAGGIPEMARHYRAFIRSALPSGGDVIVGGWSLGGLISLEIAHQIAEEARRSPPGEPRLRVVGIVMVDSVCPVIGTASWRPIVEHNIVWSENTREETKQKVMRCFSEALRMVREWKLPDWEGEEGVEGERGEEGDDGERAPPPLRPPPVVLLRALECVPEPGEGLSRVDVYRSDPQLGWGLYRKDLIAKVIDIPGHHFNLFHTEENLDATTEAIKKACREIEMRANFGSHTSE

SEQ ID NO: 5270 - DNA, 1602 bp, Myceliophthora thermophilia
atggagccatcatcattgccccccatagcagaaatccagcaggttagccctgctcacgtcaggatgccgtccacgtcgtcctcggaaacggcctacacgacggatgactcgccgaggtccagcaagacgccgcatacgcgatcgtcctcgtcggcatctgacatctcgtacgtaaaagagaagaagccctctcactcgcactcgccatccagcgcgtccgccgcgtccgacacgtcagtgacgcccctggttcgggacaaggagaagcgggagagctactcgtccgtctggtccgacctcgaggcccagcggggagagatcgacgacttctcgcgcaagcgcttcggcttcctccgctacaccatcctcaccgtctaccgccgcctgttcagcctggccttcatcggcaacgccatcgccttcgtcgtcctcatgatcaagggcgccgccccgctggacctcgtcaatgcctcggccgtcaacctggccgtgtgtggcctctgccggcacccgctcgtcatcaacgccctgttcctcaccttcggcgccgtcccgcgctcggcgcccatgcgcctgcgccggctggcctgcaagatcttccacctcggcggcgtccacagcggcaccggcgtggcctcgtgcgtctggtacatcggcttcgccgccacctacacgtaccacttcgaggcctcgcctgcctccgtcgccgtcctggtgctcatctggctcgtcctgctgctgctgctggccatcatcgccgtcgcccacccggccttccgcgtccggcaccacgactggttcgagctcacccaccgcttctccaactgggccatcctggccctcttctgggtcctcctcttcctgctcgcaaaccaggagccctcggtctcggcctttctcgtcaacctgcccgccttctggatcctcatcctgctgaccgccgccaccatccacccctggctgctcctccgccgcgtgcccgtccgggccgaaccgctctcggcccacgccgtccgcctgcacttctcccacgccgcagtccgcttcggccagggcatcagcgtcgcccgccacccgctggccgactggcacagcttcgccagcttcaccgaccagttcgacacgcccgacacaaagttctcctgcctcgtctccaaggcgggcgactggacccgccaggccatcgccgacccgcccacctacctctggaagcgcggcgtgcccacctacggcttcggctacgtcttccgcatgttcgaccgcatcatcgtcgtcaccaccggctccggcatcgggccctgcctgtccttcatcgaggacgcccaccgccccgccatgcgcgtcgtctggcagaccaagagcccgctcaagacgtacggccagcgcaccctcgacctggtcgccaggatggacccggaccccgtcgtcatcgacacctccatctccggccgcgtcgacatgctccccatcgtcctcaagctgtacaaggactttgacgcccaggccgtctgcgtcatcagcaaccccgccatgacccgcagcctcgtctacggcctcgagacgagggggatcgccgcctatgggcccatctttgacagctaa

SEQ ID NO: 5271 - protein, 533 aa, Myceliophthora thermophilia
MEPSSLPPIAEIQQVSPAHVRMPSTSSSETAYTTDDSPRSSKTPHTRSSSSASDISYVKEKKPSHSHSPSSASAASDTSVTPLVRDKEKRESYSSVWSDLEAQRGEIDDFSRKRFGFLRYTILTVYRRLFSLAFIGNAIAFVVLMIKGAAPLDLVNASAVNLAVCGLCRHPLVINALFLTFGAVPRSAPMRLRRLACKIFHLGGVHSGTGVASCVWYIGFAATYTYHFEASPASVAVLVLIWLVLLLLLAIIAVAHPAFRVRHHDWFELTHRFSNWAILALFWVLLFLLANQEPSVSAFLVNLPAFWILILLTAATIHPWLLLRRVPVRAEPLSAHAVRLHFSHAAVRFGQGISVARHPLADWHSFASFTDQFDTPDTKFSCLVSKAGDWTRQAIADPPTYLWKRGVPTYGFGYVFRMFDRIIVVTTGSGIGPCLSFIEDAHRPAMRVVWQTKSPLKTYGQRTLDLVARMDPDPVVIDTSISGRVDMLPIVLKLYKDFDAQAVCVISNPAMTRSLVYGLETRGIAAYGPIFDS

SEQ ID NO: 5272 - DNA, 1170 bp, Myceliophthora thermophilia
atggcgcccatcaaggtcgggatcgtgggctacggcttcgcgacaaagtgctttcatctgccctacattctgcccaacccagagctcgaagtctacgccttcctgcagcgggcggcgcctcccagcgacccgtcagagacaccgcgctggggccattgcactattgacttcccccaggcgaagcactaccggacggcggaggagtttttcgccgacgagctgattgaactggtggtcgtgtgcacgagtacggcgcacggggagtatgccgagagggctctggtcgcgggaaaacacgtggtcgttgagaaacctttcgtcaacactagtgccgaggccgacaggctgatcgcgctggctagggaaaagggcaagatcttgaccgtgtttcacaatcgcaggttcgacagcgacttccgcactctccaccacctcgtgacccacggtgccctcggtgatatccttgaggcagatatccacttcgactacccggatcctagctggatatccggatggacgatgaaagagtatacccctgggcaggggatgacgttcgcgctaggcacgcacactctggatcaagcactgtacctgtttgggcgcccatcctcagtaacaggtttctttcgttccaaccgcggcattgatagtgaggttgacgacacccacaccatcattcttcagtattacggcgagcagaagaacctgctggtaacggtgaagacggccatcgtcacaaacatgaaggaccaactgcgcttctttgtccgtggcaacaagggcacctacctcaaggcaaacaacaccccgcatccccacacttgctgtctctccgattatcaggcgttgctaatgccggccactgcggccccgggcgaaccagcaacgagccccgactttggcgtcgaggacgagcggatctggggtacgctgacgactacggccgagttcgaccccaagactcagcagttcgatgagcagagcaagaagtatgttggcaagtaccccagtctccgaggctggtacagggggtactatgagaatgtctcggctgccattctcggcagggaagaggttctggtcaagcccgagacggcaagagacggcttgaggatcatcgagttggcgagggaatctcacgagaaggggtgtaccgttccttggtcatag

SEQ ID NO: 5273 - protein, 389 aa, Myceliophthora thermophilia
MAPIKVGIVGYGFATKCFHLPYILPNPELEVYAFLQRAAPPSDPSETPRWGHCTIDFPQAKHYRTAEEFFADELIELVVVCTSTAHGEYAERALVAGKHVVVEKPFVNTSAEADRLIALAREKGKILTVFHNRRFDSDFRTLHHLVTHGALGDILEADIHFDYPDPSWISGWTMKEYTPGQGMTFALGTHTLDQALYLFGRPSSVTGFFRSNRGIDSEVDDTHTIILQYYGEQKNLLVTVKTAIVTNMKDQLRFFVRGNKGTYLKANNTPHPHTCCLSDYQALLMPATAAPGEPATSPDFGVEDERIWGTLTTTAEFDPKTQQFDEQSKKYVGKYPSLRGWYRGYYENVSAAILGREEVLVKPETARDGLRIIELARESHEKGCTVPWS

SEQ ID NO: 5274 - DNA, 1047 bp, Myceliophthora thermophilia
atgagttcccagaagcaattcaatgtcggcatcgtaggctacggcgggtcgccgaccgagggcaactcggcgccggcagaccacccgggaattctgcacgtgcggacggcggaggagctgctggcggaggaggcgggcgtggacgtggtggtgctgtgcaccccgccggacacgcactaccgcctggcgcgggcggcgctcgaggcgggcaagcacgtgctggtcgagaagccgttcgtgccgacggccgccgaggccgccgagctggcggggctggcccgcgcccgcggccgggtcctgtgcgtgtaccagaaccgccgctgggactcggacttcctcaccgtccgccgcctgctcgaccagggcaccctcggccgcgtcgtcgagttcgagacgcacttcgaccgcctgcgcatcgccgcgccctcgggcggctggaaggccggcacgagcatccgcgacggcggcggcgtcctctacgacctgggcacccacctgctcgaccaggtctttgtcctgttcggcatgcccaccgccgtctacgcccgcttcgtgcgccagcgcgagggcaggctggtccggggcgtcggcggcgaggcggacgagcccgacagcgtcacggccgtcctgacctacgacgccaccggcctggtcgtgtacgtgcggatcggcgtggtcagcgtcgagtcggaccagctgcgcttctgggtccgcggcagcaaggggagctaccgcaagaccgggctggacccccaggaggaccagctccggcgcggcggcaaggcgaccgacgccgactttggcagggaggacgagtcccggtacggccgcctgagcctcctgcaggaggacggctccgtgctggaccggccctgcccgaccgtcgagccggagacctacctcgagttctacaagctgttcgccaaggcggtcgagagcggcagcgaggaagacgtgcccgtgccccccacccaggccgctcaggtcctgcgcatcatcgaggccatcagggagagtgcgaggtcgggaagggaggtaaccctctga

SEQ ID NO: 5275 - protein, 348 aa, Myceliophthora thermophilia
MSSQKQFNVGIVGYGGSPTEGNSAPADHPGILHVRTAEELLAEEAGVDVVVLCTPPDTHYRLARAALEAGKHVLVEKPFVPTAAEAAELAGLARARGRVLCVYQNRRWDSDFLTVRRLLDQGTLGRVVEFETHFDRLRIAAPSGGWKAGTSIRDGGGVLYDLGTHLLDQVFVLFGMPTAVYARFVRQREGRLVRGVGGEADEPDSVTAVLTYDATGLVVYVRIGVVSVESDQLRFWVRGSKGSYRKTGLDPQEDQLRRGGKATDADFGREDESRYGRLSLLQEDGSVLDRPCPTVEPETYLEFYKLFAKAVESGSEEDVPVPPTQAAQVLRIIEAIRESARSGREVTL

SEQ ID NO: 5276 - DNA, 1368 bp, Myceliophthora thermophilia
atgccaccgggcaaccagcacatccagaccacaatgaaggtgctcatgctcggcgcgggcttcgtcacccggccgaccctcgacatcctcagcgacgccggcatccctgtgacggtcgcctgccgcaccctggcctctgcccagcagctcgccgcgggcgtcaagaatgcgcaccccatctcgctcgacgtgaccgacgaaaaggcgctggacgccgaggtggccaagcatgacctggtcatcagcctgatcccctacaccttccatgccaccgtcatcaagtcggccatccgcaacaagaaagatgtcgtgaccacaagctacgtctcgccggcgatgctcgagctcgacgccgaggccaaggcggccggcatcaccgtcatgaacgagatcggtctggatccgggcatcgaccacctgtacgccatcaagaccattgacgaggtacaccgtgagggcggcaagatcctcagcttcctgtcatactgcggcggtctcccggctccggaggactcggacaacccgctcggctacaagttctcgtggtcgtcgcgcggcgtgctcctggccctccgcaacgcgggcaagtggtggcaggatggctccgtcgtcgaggtgtccggcaaggatctgatgaagactgctaagccgtacttcatctaccccggtttcgccttcgtcgcctacccgaaccgcgactcgacccagtacaaggagcgctacgccatccccgaggcccagaccatcatccgcggcactctgcgctaccagggcttcccgcagttcatcaaggtgctcgtcgacatcggcttcctcgaggacgccccgctcgacgtcctgtcgcggccggtgccctggaaggaggccacgcaggccgtcgtcggcgccgcgtcgtcgtcggccgccgacctcgaggcggccatcctctccaaggcgacgttcgagtcggacgaggacaagcagcgcatcctgtccgggctccgctggatcggcctgttctcggacgagcccatctcgcccaagtgcaaccccctcgacacgttgtgcgccaccctcgagcgcaagatgcagtacgaggagggcgagcgcgacctggtcatgctccagcacaagttcgagattgagcacaaggacggctcgcgcgagacgcgcacctcgaccctgtgcgagtacggcgaccccaagggctactcggccatggccaagctggtcggcgtgccctgcgccgtcgccgtcaagcaggtgctgagcgggcagctgaaggacaagggcattgtggcgcccatgaactcgaggatcaatgagcccctgatgaaggagctgaaggagaagtatggaatcaccatggtggagaagactatttcgtga

SEQ ID NO: 5277 - protein, 455 aa, Myceliophthora thermophilia
MPPGNQHIQTTMKVLMLGAGFVTRPTLDILSDAGIPVTVACRTLASAQQLAAGVKNAHPISLDVTDEKALDAEVAKHDLVISLIPYTFHATVIKSAIRNKKDVVTTSYVSPAMLELDAEAKAAGITVMNEIGLDPGIDHLYAIKTIDEVHREGGKILSFLSYCGGLPAPEDSDNPLGYKFSWSSRGVLLALRNAGKWWQDGSVVEVSGKDLMKTAKPYFIYPGFAFVAYPNRDSTQYKERYAIPEAQTIIRGTLRYQGFPQFIKVLVDIGFLEDAPLDVLSRPVPWKEATQAVVGAASSSAADLEAAILSKATFESDEDKQRILSGLRWIGLFSDEPISPKCNPLDTLCATLERKMQYEEGERDLVMLQHKFEIEHKDGSRETRTSTLCEYGDPKGYSAMAKLVGVPCAVAVKQVLSGQLKDKGIVAPMNSRINEPLMKELKEKYGITMVEKTIS

SEQ ID NO: 5278 - DNA, 852 bp, Myceliophthora thermophilia
atgacgagacctctcgagggcaagctcggcatcgtaacaggcgcctcccgaggcatcggcgccgccatcgccgagaacctcgcctcgaagggctgcaacctcgtcatcaactacacatcgtcctcctccgccgacctcgccgcctccgtggccgagcagctgagcaagacgtacggcgtgcgggcggtccccgtccgagccgacgtgggcacgccggcgggggcggcggcgctcatcgcgggcgcgcagcagcacttcccgccgccctcggaaggggcccggttccagatcgacatcatcgtcaacaacgccggcatcgcgcgcaacgcgctcctcccgcaggtgacggtggaggacttcgaggagacgtaccgggtcaacgtgctgggcccgctgctggtggtgcaggcggcgcagccgcacctgccgcgggaccggtccgggcgcatcgtcaacctctcgtccgtctcgtcctcgaccggcttcgtcacccagtccgtctacggcggcaccaaggccgccctcgaggccatgacgcgcacctgggcccgcgagctggccgagaacgcgaccgtcaacgcggtcaacccgggccccgtcgagggccccatgtacgccgccaacacgcccgagttcctcgacggcatccgcggctggatcctgcacacccccctcatgaaggcccgcgagggcgtcgacccggacgacgtcgtccgcgacgcaaacgagaccggcggccgcccggcctacaccaaggaggtcgccggcatcgtgggcatgctgtgcggcgaggacgccggctggtgtacggggcaggtggtgtgcgccaatggcgggatgctgatgcactag

SEQ ID NO: 5279 - protein, 283 aa, Myceliophthora thermophilia
MTRPLEGKLGIVTGASRGIGAAIAENLASKGCNLVINYTSSSSADLAASVAEQLSKTYGVRAVPVRADVGTPAGAAALIAGAQQHFPPPSEGARFQIDIIVNNAGIARNALLPQVTVEDFEETYRVNVLGPLLVVQAAQPHLPRDRSGRIVNLSSVSSSTGFVTQSVYGGTKAALEAMTRTWARELAENATVNAVNPGPVEGPMYAANTPEFLDGIRGWILHTPLMKAREGVDPDDVVRDANETGGRPAYTKEVAGIVGMLCGEDAGWCTGQVVCANGGMLMH

SEQ ID NO: 5280 - DNA, 723 bp, Myceliophthora thermophilia
atgcgaaaaccctcctcgttgattacggcgctcgcaaggcccggaagccctcagcggatgggcgtccccaggaagttccgaaccgcggctggctactctcgctcattgacaccgtcacatgttggtcgcagccaagctgccgcaagtcagcggtctgccacgttgggacaagtggcactaggctggttcatgatgttcctgcaaagcgccagacgagaatttgagcattggaccatcattaagccgtccaaatcgactatgtgggtcgtgcactggttgctgggctttctcttctacttcaccatcaacctatcggtctgggtggagggatctcatgccatcttgaacccggccggccacgcagacgatgcgcagtccctcttgaagatggccgcggcaaccccggtgttcctgttcgcttggatcaaccagtattggtgtcacaagcaccttgccgaactgaagaagtattcgttaccgaccgctggcatgttccgacactacatctgtccgcattatacttgcgagtgtcttctctacctttccatagccatcgcgacggcccctcgcggtgtgtggttgaacaggacgatggtgtgcgccctcttgttcgtggcaaccaacctcggagtaaccgcagcgggaacccgcaaatggtacggcgaaacgttcggcatcggctctgtcgcaaacaagtggaatatgatcccattcatcttctag

SEQ ID NO: 5281 - protein, 240 aa, Myceliophthora thermophilia
MRKPSSLITALARPGSPQRMGVPRKFRTAAGYSRSLTPSHVGRSQAAASQRSATLGQVALGWFMMFLQSARREFEHWTIIKPSKSTMWVVHWLLGFLFYFTINLSVWVEGSHAILNPAGHADDAQSLLKMAAATPVFLFAWINQYWCHKHLAELKKYSLPTAGMFRHYICPHYTCECLLYLSIAIATAPRGVWLNRTMVCALLFVATNLGVTAAGTRKWYGETFGIGSVANKWNMIPFIF

SEQ ID NO: 5282 - DNA, 1341 bp, Myceliophthora thermophilia
atggctaccaccaggaagcgctacgccatcgtgggcacgggcgcccggtccagcttcttcttcaatgccatcgggcaggactaccgggcgacggcgtgcgtggtggcgctctgcgacaccaaccagacgcgcatgaaccagcgcaacaagcggctcgaggccatcgggcacgggtcggtgccgacgtacccggccgccgactttgaccgcatgatcgccgagaccaggccggacgaggtgatcgtgacgaccatcgaccggacgcaccacacctacatcatccgcgccctcgagctcggctgcaacgtggtgaccgagaagcccatgacgatcgacgcgccgcgctgcctcgacatcctgtcggcggtcgaccggaccggcggccgggtgcgcgtcgccttcaactactggtacgcgccgcacaacacgaagatctacgagctgctgcggtcgggcgccgtctgcactttcatgtcgatctacgagctgctgcggtcgggcgccgtcggcaccgtcacgtcggtccacttcgagtggctgctcgacacgtcgcacggcgccgactacttccgccgctggcaccgcgacaagcgcaacagcggcggcctgctggtccacaagtcgacccaccacttcgacctcgtcaacttctggctgcgcacccggcccctgtccgtctacgcccagggcgacctccggttctacggccgcgagaacgccgaggcccgcggcgtcacccgcttctacagccgcgcccgcggcagcgaggccgcccgcgacgaccccttcgccctccacctggaccgcgtgccggcgctcaaggagctctactgggacgccgagcacgaggacggctactaccgcgaccagagcgtcttcggcgacggcatcagcatcgaggacaccatgagcgtcctggtccggtaccgcaacggcgccgtcatgacctactcgctgaccgcctacgcgccctgggaggggttccgcgtcagcttcaacgggacggggggccggctggaggtcgaggtggccgagaacagctacgtcaacgcggcgggcgagcaggggcccgagggggcggccgagcggcggtccatcctgctgcggcccctgttcggcaagccgagggaggtcgagatccccgccgcggacggcgcccacggcggcggcgacaagatcctgctccgcgacctgttcggcgagccgcagaccgacgagtacatgcgcgccgccggccacctcgacggcgccgcctccatcctgaccggcatcgccgccaacaagtccatggccaccggtcaggtggtgtacgtcgacgacatcctgaagcttccggattga

SEQ ID NO: 5283 - protein, 446 aa, Myceliophthora thermophilia
MATTRKRYAIVGTGARSSFFFNAIGQDYRATACVVALCDTNQTRMNQRNKRLEAIGHGSVPTYPAADFDRMIAETRPDEVIVTTIDRTHHTYIIRALELGCNVVTEKPMTIDAPRCLDILSAVDRTGGRVRVAFNYWYAPHNTKIYELLRSGAVCTFMSIYELLRSGAVGTVTSVHFEWLLDTSHGADYFRRWHRDKRNSGGLLVHKSTHHFDLVNFWLRTRPLSVYAQGDLRFYGRENAEARGVTRFYSRARGSEAARDDPFALHLDRVPALKELYWDAEHEDGYYRDQSVFGDGISIEDTMSVLVRYRNGAVMTYSLTAYAPWEGFRVSFNGTGGRLEVEVAENSYVNAAGEQGPEGAAERRSILLRPLFGKPREVEIPAADGAHGGGDKILLRDLFGEPQTDEYMRAAGHLDGAASILTGIAANKSMATGQVVYVDDILKLPD

SEQ ID NO: 5284 - DNA, 1086 bp, Myceliophthora thermophilia
atggcctcagtcctctactctccagtcatcgagctgctagactcggcaaagcgtctcgtcctgtcgccactcttgacgggtccgttactctattctttcacacacccggacgcagtgcgccgtgttctcgccgccatcgcccagcacctccctgagcaggccgcggcacggcttagctcgctgcccaactcggcgacggtcactgtcctgcaggtgctcgtcgccctgggtctcgtgcgcatggtgaacggggcgctaaacagcatggccgccaactcgtggcggctgacggcggcccccggctgggactggccgaacgagatcgccgtcgtcacgggcggctcgagcgggatcgggaagggcatcgtggagcggctggccgcgctgggcgtgcgcgtcgccgtcctggacatccaggacctgcccaaggacctgcagggcaacccgcgcgtccgcttcttccgctgcgacgtgacgtcgtccgagtcggtcgggaccgccgccgacgcggtccgccgcgagctgggccacccgtccatcctggtcaacaacgcgggcgtcgccaagacggcgcccatcctccagacggacgagaacttcctgcggcgcatcctcggcgtcaacctcatgtccatgtggttcacgacgcagcagttcctcccccgcatggtgcaggtcaacaagggccacatcgtgacggtggcgagcatcgcctcctttgtggccctggccacggccgccgactactcggccaccaaggcgggcgcgctcgccttccacgaggcgctcgcctccgagatcaagcaccagtacaaggcccgcaacgtgctcacctcggtcgtccaccccaactttgtccgcaccccgctgatcgaggacttctcgtcccgcctcgagcgccggggcgtgcgcctgctcaccagcgaccgcgtcgccgacgacgtcgtcgcccagatcaagagccgcaggggcggccagctcatcatcccgccctcggccacgggcgtctccggcatcaggggctggcccacctggctgcaagagctcctgcgcgacggggtggccgccggcgcggtcaagccgtag

SEQ ID NO: 5285 - protein, 361 aa, Myceliophthora thermophilia
MASVLYSPVIELLDSAKRLVLSPLLTGPLLYSFTHPDAVRRVLAAIAQHLPEQAAARLSSLPNSATVTVLQVLVALGLVRMVNGALNSMAANSWRLTAAPGWDWPNEIAVVTGGSSGIGKGIVERLAALGVRVAVLDIQDLPKDLQGNPRVRFFRCDVTSSESVGTAADAVRRELGHPSILVNNAGVAKTAPILQTDENFLRRILGVNLMSMWFTTQQFLPRMVQVNKGHIVTVASIASFVALATAADYSATKAGALAFHEALASEIKHQYKARNVLTSVVHPNFVRTPLIEDFSSRLERRGVRLLTSDRVADDVVAQIKSRRGGQLIIPPSATGVSGIRGWPTWLQELLRDGVAAGAVKP

SEQ ID NO: 5286 - DNA, 837 bp, Myceliophthora thermophilia
atgccccctaccccgcaccacgtcctactcctcggcggtcacggcaaggtcgcccagctgctcaccccgctactgctgcgccgcgggtgggacgtgacgagcgtgatccgcacagaggagcaggcgccgaccatccaggggctagctcccaaggacgggggggaggggacggggaggttgaaggtgcttgtgcggagtctggaggaggtgaagagcgagagcgacgcggagaaggtgatttccgagtggggaggagattatgtcgtctggagtgctggggctggtgggaaagggggtcctgaacgattgaaacacggttctgacgaagggggcctcaagacttacgctatcgaccgcgacgccgcgatccacttcatccgtgccgcggccgcggccccgcacgtcactcgctttctgatggtttcgtacctggcctcacggcgcggccggccagcctggtggtccgaggaggcctgggccgcggcccggcacctcaacgagcaggtcttgccgcactactaccgcgccaagctggccgccgatgaggcgctctacgccgtgtccaaggagagaggggacgccttcgtgggtatcaatctgcggccgggaacgctcacgctcgagccggcgggacgggtcgagctgggtaagacgggggacgtgagaggcaatgtgagcagggcgacggtggcgagggtggccgacttgttgctggcgagcgaggggatcaagaacacgtggctggacttgctggacggggacgaagaggcggaggcggcggtggagagggtcgtcagggacggggtgaacgcggccgagggggaagatattttttga

SEQ ID NO: 5287 - protein, 278 aa, Myceliophthora thermophilia
MPPTPHHVLLLGGHGKVAQLLTPLLLRRGWDVTSVIRTEEQAPTIQGLAPKDGGEGTGRLKVLVRSLEEVKSESDAEKVISEWGGDYVVWSAGAGGKGGPERLKHGSDEGGLKTYAIDRDAAIHFIRAAAAAPHVTRFLMVSYLASRRGRPAWWSEEAWAAARHLNEQVLPHYYRAKLAADEALYAVSKERGDAFVGINLRPGTLTLEPAGRVELGKTGDVRGNVSRATVARVADLLLASEGIKNTWLDLLDGDEEAEAAVERVVRDGVNAAEGEDIF

SEQ ID NO: 5288 - DNA, 1017 bp, Myceliophthora thermophilia
atgacttcccatcccgagttcggtgaacgaacacctggctctgaagtggccaaagtgttcgccgaccaaattcgggggaaaaccatcttggtgaccggcgttagtcccaagagcatcggcgcctccaccgtcctgaacctggcgtcccagagcccgggtcttcttattcttgcgtcacgtaccaaaagtcggattcaagaggtcgctgaccagataacgacaaagtatcctggcgtgcgggtggagactgtcctcgtggatttgggctcacaagaatccatccgtcgagcggctgcagacgtggcggccttgactgacaagctcgacatcctgatcaacaacgccggaagggttgtcacctctcgccaagcgactcaggagggtatcgaacagcagttcggtaccaaccatatcggcccgttcctcctgaccaaccttctgctgcccctgctacggaaggcggcagagactaaccctccgggcgcgactcgcattgtgaacctctcgagtgctggtcacaggctgtctcccgtccgcttctccgattacaacctcgaaggcaaacctgtcccgcctgaggaagatcatgtcaagccccttccaggcgcctttgcaaactgcactcctgacggttacaagcccatcgtcgcatacgcgcagtcgaaatcggcaaacatcctgtttaccatctccctacaaaggcatctggccaaccatggcatcgcctcttatgccgtccaccccggctctatcgtcaccgagctcagccgagagcaagacgacgaactcaacgccgaattccacaagctgataaagtactggaaaacccctgatgaggggagctcaaccacacttgttgccgcgctggacccagctctgaatgaggtcaaaggtttctatctttctgactgtcagtatactgagccctcggcacatgccaaggacgccgccgctgcagaccgcctgtggaagttgagtgaagagctggtcggggagaagttttccatagggggttga

SEQ ID NO: 5289 - protein, 338 aa, Myceliophthora thermophilia
MTSHPEFGERTPGSEVAKVFADQIRGKTILVTGVSPKSIGASTVLNLASQSPGLLILASRTKSRIQEVADQITTKYPGVRVETVLVDLGSQESIRRAAADVAALTDKLDILINNAGRVVTSRQATQEGIEQQFGTNHIGPFLLTNLLLPLLRKAAETNPPGATRIVNLSSAGHRLSPVRFSDYNLEGKPVPPEEDHVKPLPGAFANCTPDGYKPIVAYAQSKSANILFTISLQRHLANHGIASYAVHPGSIVTELSREQDDELNAEFHKLIKYWKTPDEGSSTTLVAALDPALNEVKGFYLSDCQYTEPSAHAKDAAAADRLWKLSEELVGEKFSIGG

SEQ ID NO: 5290 - DNA, 924 bp, Myceliophthora thermophilia
atggtctccatcaagacagtagcagtcctcgggggcacaggaaacctcggtcccgccgtgatccgcgagctggtggcgtcgggcttcgccgtgacggccgtgacgcgcgcggagggcggcgccggcgcgcgcgaggtgcccgcgggcgttgcggccgtcaagagcgtcgactacggctcgctcgacgacctcacggccgccttccagggccaggacgcggtggtgtcgacggtcgcgacggcggccgtgggcgggcagaggctcgccgtcgacgccgccgtcgccgccggtgtgaagcggttcattccgtccgagttcggcatcaacacgcgcaaggtgcgcgacacccccatcggcaagatcctggcgggcaagatcgccatcgtggactacctggagcaggtggcggctaagggatccgggctgacttggacgggagtgtcgacggggttgtttttcgagtggggcctcgaacgcggcgggctgggtatcgtcaacctcaaagacaagacggctaccgtcatcgactcgggcgacgagaagtggtacgcgagcaccctcgcacagatcggccgtgtggtggccgggatcctgaaaagtcccgacgagacggcgaacaagtacctgtccacggcgtcgttcaacctctcccagaatgagctgattgccctggtcgaggagttgacgggctccaagctctccgtcaccaaggtcagctcggccgacctgatcagggctggcgaggagaaactaaccgccggcaattttggggcatttctggatcttttaagggcgcacaacaatgcggacggcgcgggcaatgggctacctgaggagcagagcgataatgggttggtcggcgtgccgtatgaggaagtgagggcttcggtcgaggaatggctgaggcgcgagggcgtcctgtag

SEQ ID NO: 5291 - protein, 307 aa, Myceliophthora thermophilia
MVSIKTVAVLGGTGNLGPAVIRELVASGFAVTAVTRAEGGAGAREVPAGVAAVKSVDYGSLDDLTAAFQGQDAVVSTVATAAVGGQRLAVDAAVAAGVKRFIPSEFGINTRKVRDTPIGKILAGKIAIVDYLEQVAAKGSGLTWTGVSTGLFFEWGLERGGLGIVNLKDKTATVIDSGDEKWYASTLAQIGRVVAGILKSPDETANKYLSTASFNLSQNELIALVEELTGSKLSVTKVSSADLIRAGEEKLTAGNFGAFLDLLRAHNNADGAGNGLPEEQSDNGLVGVPYEEVRASVEEWLRREGVL

SEQ ID NO: 5292 - DNA, 1008 bp, Myceliophthora thermophilia
atggccgatacaccagcccccccagcccagttcactccccgcttccgcacggatatctatccattcattcatccttccaagtttagaggtactctgcaggacaaggtcgccatcatcacaggcgctgcgggagccataggccaagctctcgccgagtcatttgctgtggcaggcgcgaaactggtgtttacataccacaatacgccgccgccgcccgagttaaaagaaaggtgtatgcggttcggggctgcgcaggtggagtttgtcaagtgcaacgttgccgagctggaggggtgtgagtcgctggtgaaacaggcgtttgacctctatggaaaggtcgatatactcgtcaacaatgccggcgcgaacggcttgggaccgatgtatgctcaggatccgcgcgactttatccacgacattgccgtcaacttccacggtccgtactacctcatgcggctgctgctcccgcacttccgcgagcggcgcagcggatgtgtgctgaatattgcgtcgcgcgcgggcaccgtcgccatcccgtacagcacgagctactgcgcgagcaaggcggctctcatcaacctgacagcgtgcacgcaaaaggagatggacgtcgaagggctggatgacgtgcacctgtacgcgctgcatccgggaggcatcaagagtgccatgaccttgaagaagtacgccagcgagtccgtgtcctccctcccgcctcaggcacagtccatcttcgccaaccagctcgacatctacaacgactcgccgtacctgaacggcatggtgtgtgtggcactggcgacgggtgtgggcaagcgcgtgctgcggggcaagtactttgacgtcgggcaggacctcgaagacgtgctggcgcaggaggaggccctgaaagcggatccggacctgtacacgttgcataccagctttctgggcgacttgacaaatgccggagtgccgcgggggggctatcatgcggaggaggtcaagtttgcgtttcccggtttttga

SEQ ID NO: 5293 - protein, 335 aa, Myceliophthora thermophilia
MADTPAPPAQFTPRFRTDIYPFIHPSKFRGTLQDKVAIITGAAGAIGQALAESFAVAGAKLVFTYHNTPPPPELKERCMRFGAAQVEFVKCNVAELEGCESLVKQAFDLYGKVDILVNNAGANGLGPMYAQDPRDFIHDIAVNFHGPYYLMRLLLPHFRERRSGCVLNIASRAGTVAIPYSTSYCASKAALINLTACTQKEMDVEGLDDVHLYALHPGGIKSAMTLKKYASESVSSLPPQAQSIFANQLDIYNDSPYLNGMVCVALATGVGKRVLRGKYFDVGQDLEDVLAQEEALKADPDLYTLHTSFLGDLTNAGVPRGGYHAEEVKFAFPGF

SEQ ID NO: 5294 - DNA, 1302 bp, Myceliophthora thermophilia
atgggctcactttccggtctccaaatgccgcaaccgttcagggttctcatagccggcggctcgtacggcggtctctcggccgcgctcaacctctatgacctctgccgcggcctgcctccccggtgcggcccagcgccggccgagggtgaggacctgccggagacgccgcagtttgccgtcgacataaccgtcgtcgacgagcgggatggcttctaccacctcatcggctcgcccctggcgctggcgtcggaagcgttcaccgaaaagtgttgggtcaagtatgacgacatccccgggttgcagtcgcccaacatccacgtcgttcagggcagcgtcaagtcggttgacccggcgcgcaaggtggctacctacctcccccacggcagcactgccgagcctcaggaggtgcggtacgactacttcgtcgcagcctccgggctgaggagggcctggcctgtcgtgcctcaatcgctgcgcaggaagcaatacctgttcgaggctggcgaccacatccgtgctgccacagctgcgagacatggagttgtcatcgtcggtggcggcgctgtcggcatcgaaatggccgccgagctcaagctcgtccacccgcatctcaacgtcacactggtccattcgcgcgacaagttgctctcctcggaagcgctgcccgacgaggtcaaggaccgcagcctggagctgctgcgggaagccggcgtcgacgtgctcatgtcgcaccggctcgaccgcacagaggaggtcaaggacgacagcggaaacagctgcctcagggtgcacttcaccaacggccacagcatgctggccgaccaggtatccctcgccgtgtcgaggagcgttcccacgacgacgtacctcccgaacgacgtgctcgacgagcagggctatgtcaaggtccaagccagccttgcgttccccgagcaatcgcccaactcggccttccacttcgctgtcggtgacttggccaagtggtccggcatcaagcgctgcggcgccgccatgcacatgggctactacgcggcccacaacatccaccggcacatgcagttgcagacgcagacagagggtcaggctgctcaggcgactgacaaaggggggatcccgaagctgctggagctggacgagattccgcccatgatcgggctggcggtgggcaagaaagccgtggcctactggcctgagggcgggatgatgtcgggtgaagatgtgatgaagaccttctttggtgacgatctcggttttgcgatctgttggaatcatcttcgactcgggggcgataaggtccagtga

SEQ ID NO: 5295 - protein, 433 aa, Myceliophthora thermophilia
MGSLSGLQMPQPFRVLIAGGSYGGLSAALNLYDLCRGLPPRCGPAPAEGEDLPETPQFAVDITVVDERDGFYHLIGSPLALASEAFTEKCWVKYDDIPGLQSPNIHVVQGSVKSVDPARKVATYLPHGSTAEPQEVRYDYFVAASGLRRAWPVVPQSLRRKQYLFEAGDHIRAATAARHGVVIVGGGAVGIEMAAELKLVHPHLNVTLVHSRDKLLSSEALPDEVKDRSLELLREAGVDVLMSHRLDRTEEVKDDSGNSCLRVHFTNGHSMLADQVSLAVSRSVPTTTYLPNDVLDEQGYVKVQASLAFPEQSPNSAFHFAVGDLAKWSGIKRCGAAMHMGYYAAHNIHRHMQLQTQTEGQAAQATDKGGIPKLLELDEIPPMIGLAVGKKAVAYWPEGGMMSGEDVMKTFFGDDLGFAICWNHLRLGGDKVQ

SEQ ID NO: 5296 - DNA, 2421 bp, Myceliophthora thermophilia
atggcccgcgaccccccctcggcaacccgccgctccagatcccgccacccggaccccgaccccgaccccgaccgggacggctaccgcgaacagcgccgtcacagacgccactcctcctccgccgccgatggatcccagcaccagcgccgcacgaagcgccgaccgacgagcacgccccgcgccggcgtcgccggcgtcgctgccgagtaccatgcctcggaagaggagggtgggtcgtccccgtcgtcgcaggtcctctccgcggccgcgctggcgcggctgaacagggagaacgcggccgcggcgcggggcgggggcggcggaaggagaggggagagggagcgggcgagggggcgggagaggcaagggatcgcaagggaggcggaagccgagagggagagggaacgggagctgaggagggaacggcggcgggaacgggagagagagcaggagcgggagagggcgaggcggagggagcggagtcgggggtatgagattgtggaagtctcgccgactaggggaaattggaaatccggagaccgggaagcaggagggacgaggaggagggtggtgagcgggccggcgttggaagaggggagaagcggcggcggcggcggcggcagcagcggcgccggtgctggtgggaaggcgtgggggggcctgagaggcggatggaggggcagccaggatagcgtgacgttggagaaggaggcgctgtggaaggggaaaaaggtgccgtggtaccagcagaaaaagaagctgtgtaagttggtggtatctcctgggggtagtaggggaggggcgcttttgctgacaagctcgttagggatcctcattggggtctgctccgtactgctcatcatcatcatcatcgtggcagcggtggtggtgcccaaggctggctccggggaggaaaagcgcgatgatgagagcagcgagagcagcgacggcaacctcgcggggatatcaccagacagcattccagaaggggcgccctcgtggctgaatccctttgtctggcaggacacaaccgacttcaacctcacctacaccgacgagatggtgggtgacctgcccgtcatgggcctcaacacggactgggacgactcggcaagggcaaacgagaacgtgccggcactggacgaaccatggggcgactacgcaaagcggccagcaagaggcgtcaacatcgggggctggctctcgctcgagcccttcatcaccccgtcgctgttcgagtatgatttacgcatgggcatcgtcgacgagtacacgctctgcaagtacctgggcaggagatgcgagagcgtgctcgagaagcactacgccacgtttgtcaccgaggacacgttccgggagatccgggacgccgggctggaccacgtccgcattcccttttcctactgggccgtgcagacgtacgagggcgacccgtacctcttccgcacgtcctggcggtacctgctccgagcgatcgagtggtgccgccgttacgggctgcgcgtcaacctcgacctgcacggcctcccgggcagccagaacgggtggaaccacagcggccggctgggcgccatcggctggctgaacggcaccaacggggacgtcaacgcgcggcggtcgctcgagatccacgaccggctgtccaagttcttcgcgcagccgcggtaccgcaacatcatcagccactacgggctggccaacgagccgcggatgacgttcctcgacaccgggaaggtgctccagtggacggcggacgcgtacgcgctggtgcggcgcaacggcgtgtcggacgccgtcgtcgtctttggcgacggcttccggggactgggcaactggcagggcgagctgacggggctggaccgggcggcgctcgacgtgcaccagtacgtcatcttcaacacgaaccagatcgtcttcaaccacagcgagaaggtccggtacgcgtgcgagggctggacggagcagacgctcgagagcatggaccgcgccaccggcttcggcccgacgctgatcgccgagtggtcgcaggccgacaccgactgcgcccggcacctgaccaacgtcggctggggcaaccgctggacgggcacgtacgtcacccccgacggcgacggcgacgtcaccacgccgcggtgcccgaccatggacagctcgtgcagctgcgaccaggccaactcgccggccagccagtggagcgacccgtacaagcgcttcctgaagctctttgccgaggcgcagatgtcgagcttcgagaagggctggggttggttctattgggtttgggataccgaggatgcaccgcagtggagctacaaaaaggggctcgccgcgggcgtcctcccggccaaggcgtacgagagagactttgactgcgacctgtcgaagattccgagcttctcggacctcccagagtattactag

SEQ ID NO: 5297 - protein, 806 aa, Myceliophthora thermophilia
MARDPPSATRRSRSRHPDPDPDPDRDGYREQRRHRRHSSSAADGSQHQRRTKRRPTSTPRAGVAGVAAEYHASEEEGGSSPSSQVLSAAALARLNRENAAAARGGGGGRRGERERARGRERQGIAREAEAERERERELRRERRREREREQERERARRRERSRGYEIVEVSPTRGNWKSGDREAGGTRRRVVSGPALEEGRSGGGGGGSSGAGAGGKAWGGLRGGWRGSQDSVTLEKEALWKGKKVPWYQQKKKLCKLVVSPGGSRGGALLLTSSLGILIGVCSVLLIIIIIVAAVVVPKAGSGEEKRDDESSESSDGNLAGISPDSIPEGAPSWLNPFVWQDTTDFNLTYTDEMVGDLPVMGLNTDWDDSARANENVPALDEPWGDYAKRPARGVNIGGWLSLEPFITPSLFEYDLRMGIVDEYTLCKYLGRRCESVLEKHYATFVTEDTFREIRDAGLDHVRIPFSYWAVQTYEGDPYLFRTSWRYLLRAIEWCRRYGLRVNLDLHGLPGSQNGWNHSGRLGAIGWLNGTNGDVNARRSLEIHDRLSKFFAQPRYRNIISHYGLANEPRMTFLDTGKVLQWTADAYALVRRNGVSDAVVVFGDGFRGLGNWQGELTGLDRAALDVHQYVIFNTNQIVFNHSEKVRYACEGWTEQTLESMDRATGFGPTLIAEWSQADTDCARHLTNVGWGNRWTGTYVTPDGDGDVTTPRCPTMDSSCSCDQANSPASQWSDPYKRFLKLFAEAQMSSFEKGWGWFYWVWDTEDAPQWSYKKGLAAGVLPAKAYERDFDCDLSKIPSFSDLPEYY

SEQ ID NO: 5298 - DNA, 1458 bp, Myceliophthora thermophilia
atggataacaacaacgactccttcggccgcccggccaccaacaatatgccctcaatggcatccaccgccgctccgacccctcaacggcccgggacgcccaacgagtctgtcgggcgcaacccctttggcgacggtgtcgagtcgcaagcgtcgcaccggtcgttcggtcagaacggcaacccctttgccagcccttcgttctcgcggccccctagtagcttcgactcgtcctcggcactgggccgcttcgaaggcggcggcgcgcgttacttccactcgcgccgcgtgcgcaagggcgagatcgagaagccatggaccaaacagtccgaccccaaggaaaaatgggttaccatcctgcctatcatcggcatcatcatcgggttgggtatctcgggcttcctggtgtgggacggcatccgcagcgtggtcaagcacaagtactgtcccgttctcatagaggattggtcccaaggcttcaacgagaaggtgtggatgaaggaggtgcaggtgaacgggttcggaaacggcgagtttgagcaaaccacggggggcgacgagaacgtgttcattgagaacggcaacctcatcatcagggcgacacctcgtgacgacgcgttgatgcaacagaactacaagatcgacctcctcaaggacggcacctgcacgtccaccaacccggccaattgcatcgccgccactaatatcacgaccggcaactcgtccatcgtgcctccagtcctctcgggccgcatcaacacgcggcgcggtgcctccatcaagtacggccgggtcgaggtgacggccaagctgcccgccggcgactggctctggccggccatctggatgatgccggtcgactccaagtacgggccgtggccggcgtcgggcgagatcgacatcatggagtcgcgcggcaacaactacacctacccgcagggtggcaacaacatcatgtcatcggcgctccactgggggccgaacccggccaacgacgcctggtggcgcaccaacgtcaagcggcaggcgctgcacacaacctactcggccgggttcaacacgttcggggtcgagtggtcgcaaaagtacctcttcacctacgtcaactcgcgcctgctgcaggtgctctacgtcaacttcgacgtgcccatgtggtcgcgcggcaacttccccgtccaggacagcaacgggacgcgcatcgacgacatctggggccacacgggccggccgcagacccccttcgaccagcccttctacctcatcctgaacctggccgtcggcggcaccaacggctggttcgaggacaacgtcaacggcaagccctggctcgaccgctcgcccaacgcccgcaaggacttctggcaggccaaggaccgctggctgcccacctggacgcagccgcggatggaggtgagcaaggtcgtaatgttgcagcagtgcgacggagatgaggatctctag

SEQ ID NO: 5299 - protein, 485 aa, Myceliophthora thermophilia
MDNNNDSFGRPATNNMPSMASTAAPTPQRPGTPNESVGRNPFGDGVESQASHRSFGQNGNPFASPSFSRPPSSFDSSSALGRFEGGGARYFHSRRVRKGEIEKPWTKQSDPKEKWVTILPIIGIIIGLGISGFLVWDGIRSVVKHKYCPVLIEDWSQGFNEKVWMKEVQVNGFGNGEFEQTTGGDENVFIENGNLIIRATPRDDALMQQNYKIDLLKDGTCTSTNPANCIAATNITTGNSSIVPPVLSGRINTRRGASIKYGRVEVTAKLPAGDWLWPAIWMMPVDSKYGPWPASGEIDIMESRGNNYTYPQGGNNIMSSALHWGPNPANDAWWRTNVKRQALHTTYSAGFNTFGVEWSQKYLFTYVNSRLLQVLYVNFDVPMWSRGNFPVQDSNGTRIDDIWGHTGRPQTPFDQPFYLILNLAVGGTNGWFEDNVNGKPWLDRSPNARKDFWQAKDRWLPTWTQPRMEVSKVVMLQQCDGDEDL

SEQ ID NO: 5300 - DNA, 1161 bp, Myceliophthora thermophilia
atgaggccgaccagtccggtcatctcggcatacgagatggcgggttactcatcgtccccgtcgcggtggaagccggccagctggacgagaaggatatggctgatcgtcggcacagtcgtcgtgctgatcgtggtcgtggtcgttggcgccgtcgtgggcgtgaaggcgacgaggaacaatggcggcggaaactcgagctatcccgactacttcaagctgaactacaccctgattgatacctattcggggactaccttctttgacaagttcaactacttccacacttgggaccctgccgggggatttgtccactacgtcgatccggactatgccggcacatataacctcacctgggcaacgtcttccaccgccctgatccgcgtcgacaccactgtcggaccgggttccgagccggacgcctccaccggccgcttctcggtccgtctcgagtccaagacgcagtacggcccgggactgttcctcttcgacgtcaagcacaccccgtacgggtgtgctacatggccagccctctggctcaccgaccccaacaactggcccgacaacggcgagatcgacgtgatggaggccgtcaaccaagccgcggcgggcaccctcgtcgccctgcacaccaccgccggctgcaccatggccgacgtccggcgcgacatggccggcgccgccgagcaggcggactgccacaacgccaccaactccaacgccggctgcgccgtccggggcgcccccgccacctacggccccgagttcaacgaggccggcggcggcatcgtcgcgctcgagtggcgcgccgagggcatccgcgtctgggtgttcccgagaggcggaagcggaagcggaagcggcggcggtgacgagagagggctggcggcgctgccggccgccgaggccaaagagaccccggacccgagcgcctggggcccgccgctggccgacttcccggcgaccagctgcgatgtgggcagccacttccggaaccagagcatcattatcaatatcgacctgtgtggctatctgaccgaggcggtatgggaggagtctgggtgtagtcgtctgaagtgcatcgatttcgtcgccaacaacccttcggcgttcaccaacgcgtattgggagtttggcgcctttcaagtctataaggcgcaatga

SEQ ID NO: 5301 - protein, 386 aa, Myceliophthora thermophilia
MRPTSPVISAYEMAGYSSSPSRWKPASWTRRIWLIVGTVVVLIVVVVVGAVVGVKATRNNGGGNSSYPDYFKLNYTLIDTYSGTTFFDKFNYFHTWDPAGGFVHYVDPDYAGTYNLTWATSSTALIRVDTTVGPGSEPDASTGRFSVRLESKTQYGPGLFLFDVKHTPYGCATWPALWLTDPNNWPDNGEIDVMEAVNQAAAGTLVALHTTAGCTMADVRRDMAGAAEQADCHNATNSNAGCAVRGAPATYGPEFNEAGGGIVALEWRAEGIRVWVFPRGGSGSGSGGGDERGLAALPAAEAKETPDPSAWGPPLADFPATSCDVGSHFRNQSIIINIDLCGYLTEAVWEESGCSRLKCIDFVANNPSAFTNAYWEFGAFQVYKAQ

SEQ ID NO: 5302 - DNA, 651 bp, Myceliophthora thermophilia
atggagttcttgtccaaggacttcaacgcgtccaacggcagctacccggtcaacctggtgctgcagtcgcgcgaggcggcggcggccgggcacgacgcgtccgggacgggcggcggccacttcgtgcgggcgctgctgccgttcgacccgacgggggacttccacgagtaccgcatcgactacctccccggccgggtcaccttctacgcggacggggagccgctcgccgacatggagggggccgcggtgccctcgtcgccgggccacctgatcctgcagcactggagcaacgggaaccggtactggtccggcgggccgccggccgaggacgcgtcgctgctggtgagctacgtcaaggcctacttcaactcgtcgacggcgcagagacggcgcgactgggaggcccggtgcagggatccgaccgcgcccggcgccgtctgcgagatcccggatgtggcgccgggaaactggagcgccgccgccgactggttcttcgctgaccacgccaacatgaccaacaaccagaccgcgtcggggcagagcgaggaggcatcatcatcatcgccatcgacagagccgtcgtggtccatcatcatcatcgtctgttggctttggctgtggctggcggccgaattcgcttctgcggtgtga

SEQ ID NO: 5303 - protein, 216 aa, Myceliophthora thermophilia
MEFLSKDFNASNGSYPVNLVLQSREAAAAGHDASGTGGGHFVRALLPFDPTGDFHEYRIDYLPGRVTFYADGEPLADMEGAAVPSSPGHLILQHWSNGNRYWSGGPPAEDASLLVSYVKAYFNSSTAQRRRDWEARCRDPTAPGAVCEIPDVAPGNWSAAADWFFADHANMTNNQTASGQSEEASSSSPSTEPSWSIIIIVCWLWLWLAAEFASAV

SEQ ID NO: 5304 - DNA, 2568 bp, Myceliophthora thermophilia
atggcaccccgcgttgtgatcccgctcgaccagaactgggagttccggcaggcggacaagccagactccaagttcctgcccgtcagccagttcccgactaacgtccacctcgacctgcaacaccacggcctgatcccggacccgttcatcggcaagaatgagctcctcgtccagtgggtgggcgaggcgcaatggacctacaggaccgtcttcgcggcgccgccggtgcccgagggcgccagggcagtaatcgcgttcgacggcctcgacactttcgcgaccgtggtgctcaatggcaccaccatcctcgagtcggacaacatgttcctcccgcatcgcgtcgaagtgacctcggtcctgaaggccgaaggtaacgagctcgtcatcacgtttgacagcgcctacctgcggggctgcaagctggtcgagcagcacccgaaccacaagtggggttgctggaacggcgacgtctcgcggctggccgtgcgcaaggcgcagtaccactggggctgggattggggcccgactctcctgacctgcggcccctggcggccggtccacctcgagatatacgagtcgcgcctgtccgatctctacgccgagacggtcgtcgacaagtcgctgaagcgggccagcgtcaaggtgacagcagtcgcagagcgcagggcggacagggtgcggttcgacatcgccctcgacggccagcaggtggccaccgagacagccgagctggacgccacgtcgggcgaggctaccgtgtcgttcctcatcgacagccccgcgctgtggtacccggtccgctatggcaagcagccgctctacgacatccgggcaaccctgctcgccggcgacgatgaggtcgacacgctttccaagcggatcggcctgcgccgcgccgagctgatccaacggccactggaaggccagccaggtacgagcttcttcttcgaggtcaacaacatccgcatctactgcggcggcagcgactggatccctgccgacaacttcatcccgcgtatcagccgtcggcgctactatgactgggtcaggctggtggccgagggcaaccagttcatgatccgcgtctggggcggcggcatctacgaagagcaggccttctacgacgcttgcgacgagctcggcatcctggtctggcaggacttcatgttcggctgcggcaactacccggcctggccggccctgctcgagtccatcaggcgcgaggccaccgagaacgtcaagcggctgcgccaccacccctccattgtcatctgggccggcaacaacgaggactaccagtaccaggagtcggagggcctcacgtacgactacgccaacaaggacgccgagagctggctcaagaccgacttcccggcccgctacatctacgagaagatcctggccgacgtgtgcgccgacctggtccccagcaccccctaccacccgggctcgccctggggcgccgggctcaatacgcacgacgccaccgtcggcgacatccatcagtggaacgtgtggcacggcacgcaggagaagtggcagaacttcgaccggctggtcggccggttcgtgtccgagttcggcatgcaggccttcccggccgtcaagaccatcgacgcctacctgcccctgggccgggacgacccggaccggtacccgcagtcgtcgacggtcgacttccacaacaaggccgagggccacgagcggcgcatcgcgctgtacctggtcgagaatctgcgctacgcgcccgacccgctcgagcactttgtctactgcacgcagctgatgcagggcgagtgcctggcctcggcctaccgcctctggaagcgcgagtggcgcggacccgggcgcgagtactgcggcggcgcgctggtctggcagaccaacgactgctggcccgtcacgagctggagcatcgtcgactactacctgcgccccaagctggcctacttcacggtcaagcgcgagatggcgcccgtgagcatcggcatcacgcgcaggacgcacctgcacccgcgcgaccggcacacccgagtcaacgtggacgtcaagacgcagatcgaggtgtgggccagcaacctgaccctcgaggacttgacggtcgactgcgtactcaaggcctgggacgtcgagagcggcgaggagaccttctccgagacggtggcggcggcgctgctcctgcgggagaaccggtcgaccgagatcgccgcgctggacgttcccgtccggcagaagaacgtcggggaggagggccggatcgtggtggcggcctatctggtcgacaaggagggcaggcagatggcccgctacgtcaactggcccgagccgctcaagtacgtgcacctgcagaagcctcgggcgctccgggcgcagctgactgccgattactcggcggtcgaggtcagcgccgaggtgccagtcaagggcgtcgcgctggagtgcgaggatgacggggtccgattcgacgacaacctggtggatattgtgccgggcgaggtggtcaccatcggcgtcagcggggcgggcaaggacaccaagatcgagacgcggtatctgggcatgatctaa

SEQ ID NO: 5305 - protein, 855 aa, Myceliophthora thermophilia
MAPRVVIPLDQNWEFRQADKPDSKFLPVSQFPTNVHLDLQHHGLIPDPFIGKNELLVQWVGEAQWTYRTVFAAPPVPEGARAVIAFDGLDTFATVVLNGTTILESDNMFLPHRVEVTSVLKAEGNELVITFDSAYLRGCKLVEQHPNHKWGCWNGDVSRLAVRKAQYHWGWDWGPTLLTCGPWRPVHLEIYESRLSDLYAETVVDKSLKRASVKVTAVAERRADRVRFDIALDGQQVATETAELDATSGEATVSFLIDSPALWYPVRYGKQPLYDIRATLLAGDDEVDTLSKRIGLRRAELIQRPLEGQPGTSFFFEVNNIRIYCGGSDWIPADNFIPRISRRRYYDWVRLVAEGNQFMIRVWGGGIYEEQAFYDACDELGILVWQDFMFGCGNYPAWPALLESIRREATENVKRLRHHPSIVIWAGNNEDYQYQESEGLTYDYANKDAESWLKTDFPARYIYEKILADVCADLVPSTPYHPGSPWGAGLNTHDATVGDIHQWNVWHGTQEKWQNFDRLVGRFVSEFGMQAFPAVKTIDAYLPLGRDDPDRYPQSSTVDFHNKAEGHERRIALYLVENLRYAPDPLEHFVYCTQLMQGECLASAYRLWKREWRGPGREYCGGALVWQTNDCWPVTSWSIVDYYLRPKLAYFTVKREMAPVSIGITRRTHLHPRDRHTRVNVDVKTQIEVWASNLTLEDLTVDCVLKAWDVESGEETFSETVAAALLLRENRSTEIAALDVPVRQKNVGEEGRIVVAAYLVDKEGRQMARYVNWPEPLKYVHLQKPRALRAQLTADYSAVEVSAEVPVKGVALECEDDGVRFDDNLVDIVPGEVVTIGVSGAGKDTKIETRYLGMI
